(19) United States
(12) Patent Application Publication
(10) Pub. No.: US 2009/0217406 A1
(43) Pub. Date: Aug. 27, 2009

(54) Plant cells and plants with increased tolerance to environmental stress

(75) Inventors: Piotr Puzio, Berlin (DE); Agnes Chardonnens, Enkhuizen (NL); Harry Wild, Berlin (DE); Gunnar Plesch, Potsdam (DE); Bryan McKersie, Raleigh, NC (US)

Correspondence Address: CONNOLLY BOVE LODGE & HUTZ, LLP, P O BOX 2207, WILMINGTON, DE, 19899, US

(73) Assignee: BASF Plant Science GmbH, Ludwigshafen (DE)

(21) Appl. No.: 11/663,915

(22) PCT Filed: Sep. 23, 2005
(86) PCT No.: PCT/EP2005/055023

§ 371 Date: Mar. 23, 2007

(30) Foreign Application Priority Data
Apr. 15, 2003 (EP) 03008079.0
Aug. 1, 2003 (EP) 03016671.4
Sep. 30, 2003 (EP) 03022226.9

(51) Int. Cl. A01H 1/02; C12N 5/10; C12N 5/04; A01H 5/00; A01H 7/00; A01H 1/00; C12N 15/74; C12Q 1/02; C07H 21/02; C07K 14/00; C07K 16/00

(52) U.S. Cl. 800/260; 435/410; 435/412; 435/416; 435/415; 435/417; 435/414; 800/322; 800/298; 800/320.1; 800/320.3; 800/320; 800/314; 800/317; 800/317.3; 800/317.4; 800/317.1; 800/317.2; 800/306; 800/319; 800/278; 435/320.1; 435/29; 536/23.1; 530/300; 530/387.1

(57) ABSTRACT

This invention relates generally to transformed plant cells and plants comprising an inactivated or down-regulated gene resulting in increased tolerance and/or resistance to environmental stress as compared to non-transformed wild type cells and methods of producing such plant cells or plants. This invention further relates generally to transformed plant cells with increased tolerance and/or resistance to an environmental stress as compared to a corresponding non-transformed wild type plant cell, methods of producing, screening for and breeding such plant cells or plants and method of detecting stress in plants cells or plants.

[0001] The instant application is based on and claims the benefit of prior filed U.S. Patent Application No. 60/613,154, filed Sep. 24, 2004 and prior filed U.S. Patent Application No. 60/618,737, filed Oct. 14, 2004.

[0002] This invention relates generally to transformed plant cells and plants comprising an inactivated or down-regulated gene resulting in increased tolerance and/or resistance to environmental stress as compared to non-transformed wild type cells and methods of producing such plant cells or plants.

[0003] This invention further relates generally to transformed plant cells with increased tolerance and/or resistance to environmental stress as compared to a corresponding non-transformed wild type plant cell, wherein the increased tolerance and/or resistance to environmental stress as compared to a corresponding non-transformed wild type plant cell is altered by an inactivated or down-regulated gene, methods of producing, screening for and breeding such plant cells or plants and method of detecting stress in plants cells or plants.

[0004] In particular, this invention relates to transformed plant cells and plants comprising an inactivated or down-regulated gene resulting in increased tolerance and/or resistance to environmental stress, preferably by altering the metabolic activity, as compared to non-transformed wild type cells and methods of producing such plant cells or plants.

[0005] Abiotic environmental stress, such as drought stress, salinity stress, heat stress, and cold stress, is a major limiting factor of plant growth and productivity (Boyer. 1982. Science 218, 443-448). Crop losses and crop yield losses of major crops such as rice, maize (corn) and wheat caused by these stresses represent a significant economic and political factor and contribute to food shortages in many underdeveloped and third-world countries.

[0006] Plants are typically exposed during their life cycle to conditions of reduced environmental water content. Most plants have evolved strategies to protect themselves against these conditions of low water or desiccation (drought) for short period of time. However, if the severity and duration of the drought conditions are too great, the effects on plant development, growth and yield of most crop plants are profound. Continuous exposure to drought causes major alterations in the plant metabolism. These great changes in metabolism ultimately lead to cell death and consequently yield losses.

[0007] Developing stress-tolerant and/or resistant plants is a strategy that has the potential to solve or mediate at least some of these problems (McKersie and Leshem, 1994. Stress and Stress Coping in Cultivated Plants, Kluwer Academic Publishers). However, traditional plant breeding strategies to develop new lines of plants that exhibit resistance (tolerance) to these types of stress are relatively slow and require specific resistant lines for crossing with the desired line. Limited germplasm resources for stress tolerance and incompatibility in crosses between distantly related plant species represent significant problems encountered in conventional breeding. Additionally, the cellular processes leading to drought, cold and salt tolerance and/or resistance are complex in nature and involve multiple mechanisms of cellular adaptation and numerous metabolic pathways (McKersie and Leshem, 1994. Stress and Stress Coping in Cultivated Plants, Kluwer Academic Publishers). This multi-component nature of stress tolerance and/or resistance has not only made breeding for tolerance and/or resistance largely unsuccessful, but has also limited the ability to genetically engineer stress tolerance plants using biotechnological methods.

[0008] Drought, heat, cold and salt stress have a common theme important for plant growth and that is water availability. Plants are exposed during their entire life cycle to conditions of reduced environmental water content. Most plants have evolved strategies to protect themselves against lack of water. However, if the severity and duration of the drought conditions are too great, the effects on plant development, growth and yield of most crop plants are profound. Since high salt content in some soils result in less available water for cell intake, its effect is similar to those observed under drought conditions. Likewise, under freezing temperatures, plant cells loose water as a result of ice formation that starts in the apoplast and withdraws water from the symplast (McKersie and Leshem, 1994. Stress and Stress Coping in Cultivated Plants, Kluwer Academic Publishers). Commonly, a plant's molecular response mechanisms to each of these stress conditions are the same.

[0009] The results of current research indicate that drought tolerance and/or resistance is a complex quantitative trait and that no real diagnostic marker is available yet. High salt concentrations or dehydration may cause damage at the cellular level during drought stress but the precise injury is not entirely clear (Bray, 1997. Trends Plant Sci. 2, 48-54). This lack of a mechanistic understanding makes it difficult to design a transgenic approach to improve drought tolerance and/or resistance. However, an important consequence of damage may be the production of reactive oxygen radicals that cause cellular injury, such as lipid peroxidation or protein and nucleic acid modification. Details of oxygen free radical chemistry and their reaction with cellular components such as cell membranes have been described (McKersie and Leshem, 1994. Stress and Stress Coping in Cultivated Plants, Kluwer Academic Publishers).

[0010] There are numerous sites of oxygen activation in the plant cell, which are highly controlled and tightly coupled to prevent release of intermediate products (McKersie and Leshem, 1994. Stress and Stress Coping in Cultivated Plants, Kluwer Academic Publishers). Under abiotic stress situations, it is likely that this control or coupling breaks down and the process “dysfunctions” leaking activated oxygen. These uncoupling events are not detrimental provided that they are short in duration and that the oxygen scavenging systems are able to detoxify the various forms of activated oxygen. If the production of activated oxygen exceeds the plant's capacity to detoxify it, deleterious degenerative reactions occur. At the subcellular level, disintegration of membranes and aggregation of proteins are typical symptoms. Therefore it is the balance between the production and the scavenging of activated oxygen that is critical to the maintenance of active growth and metabolism of the plant and overall environmental (abiotic) stress tolerance and/or resistance.

[0011] Preventing or diminishing the accumulation of oxygen free radicals in response to drought is a potential way to engineer tolerance (Allen, 1995. Plant Physiol. 107, 1049-1054). Overexpression of antioxidant enzymes or ROS-scavenging enzymes is one possibility for the induction of functional detoxification systems. For example, transgenic alfalfa plants expressing Mn-superoxide dismutase tend to have reduced injury after water-deficit stress (McKersie et al., 1996. Plant Physiol. 111, 1177-1181). These same transgenic plants have increased biomass production in field trials (McKersie et al., 1999. Plant Physiology, 119: 839-847; McKersie et al., 1996. Plant Physiol. 111, 1177-1181). Transgenic plants that overproduce osmolytes such as mannitol, fructans, proline or glycine-betaine also show increased resistance to some forms of abiotic stress and it is proposed that the synthesized osmolytes act as ROS scavengers (Tarczynski. et al. 1993 Science 259, 508-510; Sheveleva,. et al. 1997. Plant Physiol. 115, 1211-1219).

[0012] It is the object of this invention to identify new, unique genes capable of conferring stress tolerance to plants upon inactivation or down-regulation of genes.

[0013] It is further object of this invention to identify, produce and breed new, unique stress tolerant and/or resistant plant cells or plants and methods of inducing and detecting stress tolerance and/or resistance in plants or plant cells. It is a further object to identify new methods to detect stress tolerance and/or resistance in plants or plant cells.

[0014] The present invention provides a transformed plant cell, preferably with altered metabolic activity compared to a corresponding non transformed wild type plant cell, wherein the increased tolerance and/or resistance to an environmental stress as compared to a corresponding non-transformed wild type plant cell is altered by an inactivated or down-regulated gene.

[0015] The present invention provides a transformed plant cell with increased tolerance and/or resistance to an environmental stress as compared to a corresponding non-transformed wild type plant cell, wherein the increased tolerance and/or resistance to an environmental stress is altered by an inactivated or down-regulated gene.

[0016] As used herein, the term “inactivated or down-regulated gene” means the transgenic reduction or deletion of the expression of nucleic acid of SEQ ID NO: 1, 3, 5, 7, 9, 11, 13, 15, 17, 19, 21, 23, 25, 27, 29, 31, 33, 35, 37, 39, 41, 43, 45, 47, 49, 51, 53, 55, 57, 59, 61, 63, 65, 67, 69, 71, 73, 75, 77, 79 and/or 81

and/or 95, 97, 99, 101, 103, 105, 107, 109, 111, 113, 115, 117, 119, 121, 123, 125, 127, 129, 131, 133, 135, 137, 139, 141, 143, 145, 147, 149, 151, 153, 155, 157, 159, 161, 163, 165, 167, 169, 171, 173, 175, 177, 179, 181, 183, 185, 187, 189, 191, 193, 195, 197, 199, 201, 203, 205, 207, 209, 211, 213, 215, 217, 219, 221, 223, 225, 227, 229, 231, 233, 235, 237, 239, 241, 243, 245, 247, 249, 251, 253, 255, 257, 259, 261, 263, 265, 267, 269, 271, 273, 275, 277, 279, 281, 283, 285, 287, 289, 291, 293, 295, 297, 299, 301, 303, 305, 307, 309, 311, 313, 315, 317, 319, 321, 323, 325, 327, 329, 331, 333, 335, 337, 339, 341, 343, 345, 347, 349, 351, 353, 355, 357, 359, 361, 363, 365, 367, 369, 371, 373, 375, 377, 379, 381, 383, 385, 387, 389, 391, 393, 395, 397, 399, 401, 403, 405, 407, 409, 411, 413, 415, 417, 419, 421, 423, 425, 427, 429, 431, 433, 435, 437, 439, 441, 443, 445, 447, 449, 451, 453, 455, 457, 459, 461, 463, 465, 467, 469, 471, 473, 475, 477, 479, 481, 483, 485, 487, 489, 491, 493, 495, 497, 499, 501, 503, 505, 507, 509, 511, 513, 515, 517, 519, 521, 523, 525, 527, 529, 531, 533, 535, 537, 539, 541, 543, 545, 547, 549, 551, 553, 555, 557, 559, 561, 563, 565, 567, 569, 571, 573, 575, 577, 579, 581, 583, 585, 587, 589, 591, 593, 595, 597, 599, 601, 603, 605, 607, 609, 611, 613, 615, 617, 619, 621, 623, 625, 627, 629, 631, 633, 635, 637, 639, 641, 643, 645, 647, 649, 651, 653, 655, 657, 659, 661, 663, 665, 667, 669, 671, 673, 675, 677, 679, 681, 683, 685, 687, 689, 691, 693, 695, 697, 699, 701, 703, 705, 707, 709, 711, 713, 715, 717, 719, 721, 723, 725, 727, 729, 731, 733, 735, 737, 739, 741, 743, 745, 747, 749, 751, 753, 755, 757, 759, 761, 763, 765, 767, 769, 771, 773, 775, 777, 779, 781, 783, 785, 787, 789, 791, 793, 795, 797, 799, 801, 803, 805, 807, 809, 811, 813, 815, 817, 819, 821, 823, 825, 827, 829, 831, 833, 835, 837, 839, 841, 843, 845, 847, 849, 851, 853, 855, 857, 859, 861, 863, 865 and/or 867 leading to an increased tolerance and/or resistance to an environmental stress as compared to a corresponding non-transformed wild type plant cell.

[0017] In the transgenic plant cell of the invention, the reduction or deletion of the expression of said nucleic acid results in increased tolerance to an environmental stress as compared to a corresponding non-transformed wild type plant cell. Herein, the environmental stress is selected from the group consisting of salinity, drought, temperature, metal, chemical, pathogenic and oxidative stresses, or combinations thereof, preferably drought and/or temperature.

[0018] The term “expression” refers to the transcription and/or translation of a codogenic gene segment or gene. As a rule, the resulting product is an mRNA or a protein. However, expression products can also include functional RNAs such as, for example, antisense, nucleic acids, tRNAs, snRNAs, rRNAs, RNAi, siRNA, ribozymes etc. Expression may be systemic, local or temporal, for example limited to certain cell types, tissues organs or time periods.

[0019] Unless otherwise specified, the terms “polynucleotides”, “nucleic acid” and “nucleic acid molecule” are interchangeably in the present context. Unless otherwise specified, the terms “peptide”, “polypeptide” and “protein” are interchangeably in the present context. The term “sequence” may relate to polynucleotides, nucleic acids, nucleic acid molecules, peptides, polypeptides and proteins, depending on the context in which the term “sequence” is used. The terms “gene(s)”, “polynucleotide”, “nucleic acid sequence”, “nucleotide sequence”, or “nucleic acid molecule(s)” as used herein refers to a polymeric form of nucleotides of any length, either ribonucleotides or deoxyribonucleotides. The terms refer only to the primary structure of the molecule.

[0020] Thus, the terms “gene(s)”, “polynucleotide”, “nucleic acid sequence”, “nucleotide sequence”, or “nucleic acid molecule(s)” as used herein include double- and single-stranded DNA and RNA. They also include known types of modifications, for example, methylation, “caps”, substitutions of one or more of the naturally occurring nucleotides with an analog. Preferably, the DNA or RNA sequence of the invention comprises a coding sequence encoding the herein defined polypeptide.

[0021] A “coding sequence” is a nucleotide sequence, which is transcribed into mRNA and/or translated into a polypeptide when placed under the control of appropriate regulatory sequences. The boundaries of the coding sequence are determined by a translation start codon at the 5′-terminus and a translation stop codon at the 3′-terminus. A coding sequence can include, but is not limited to mRNA, cDNA, recombinant nucleotide sequences or genomic DNA, while introns may be present as well under certain circumstances.

[0022] For the purposes of the invention, as a rule the plural is intended to encompass the singular and vice versa.

[0023] The terms “reduction”, “decrease” or “deletion” relate to a corresponding change of a property in an organism, a part of an organism such as a tissue, seed, root, leave, flower etc. or in a cell. Under “change of a property” it is understood that the activity, expression level or amount of a gene product or the metabolite content is changed in a specific volume or in a specific amount of protein relative to a corresponding volume or amount of protein of a control, reference or wild type. Preferably, the overall activity in the volume is reduced, decreased or deleted in cases if the reduction, decrease or deletion is related to the reduction, decrease or deletion of an activity of a gene product, independent whether the amount of gene product or the specific activity of the gene product or both is reduced, decreased or deleted or whether the amount, stability or translation efficacy of the nucleic acid sequence or gene encoding for the gene product is reduced, decreased or deleted.

[0024] The terms “reduction”, “decrease” or “deletion” include the change of said property in only parts of the subject of the present invention, for example, the modification can be found in compartment of a cell, like an organelle, or in a part of a plant, like tissue, seed, root, leave, flower etc. but is not detectable if the overall subject, i.e. complete cell or plant, is tested. Preferably, the “reduction”, “decrease” or “deletion” is found cellular, thus the term “reduction, decrease or deletion of an acitivity” or “reduction, decrease or deletion of a metabolite content” relates to the cellular reduction, decrease or deletion compared to the wild typ cell. In addition the terms “reduction”, “decrease” or “deletion” include the change of said property only during different growth phases of the organism used in the inventive process, for example the reduction, decrease or deletion takes place only during the seed growth or during blooming. Furthermore the terms include a transitional reduction, decrease or deletion for example because the used RNAi is not stable integrated in the genom of the organism and has therefore only a transient effect.

[0025] Accordingly, the term “reduction”, “decrease” or “deletion” means that the specific activity of an enzyme or other protein or regulatory RNA as well as the amount of a compound or metabolite, e.g. of a polypeptide, a nucleic acid molecule or the fine chemical of the invention or an encoding mRNA or DNA, can be reduced, decreased or deleted in a volume.

[0026] The terms “wild type”, “control” or “reference” are exchangeable and can be a cell or a part of organisms such as an organelle or tissue, or an organism, in particular a microorganism or a plant, which was not modified or treated according to the herein described process according to the invention. Accordingly, the cell or a part of organisms such as an organelle or a tissue, or an organism, in particular a microorganism or a plant used as wild type, control or reference corresponds to the cell, organism or part thereof as much as possible and is in any other property but in the result of the process of the invention as identical to the subject matter of the invention as possible. Thus, the wild type, control or reference is treated identically or as identical as possible, saying that only conditions or properties might be different which do not influence the quality of the tested property.

[0027] Preferably, any comparison is carried out under analogous conditions. The term “analogous conditions” means that all conditions such as, for example, culture or growing conditions, assay conditions (such as buffer composition, temperature, substrates, pathogen strain, concentrations and the like) are kept identical between the experiments to be compared.

[0028] The “reference”, “control”, or “wild type” is preferably a subject, e.g. an organelle, a cell, a tissue, an organism, in particular a plant or a microorganism, which was not modified or treated according to the herein described process of the invention and is in any other property as similar to the subject matter of the invention as possible. The reference, control or wild type is in its genome, transcriptome, proteome or metabolome as similar as possible to the subject of the present invention. Preferably, the term “reference-” “control-” or “wild type-”-organelle, -cell, -tissue or -organism, in particular plant or microorganism, relates to an organelle, cell, tissue or organism, in particular plant or microorganism, which is nearly genetically identical to the organelle, cell, tissue or organism, in particular microorganism or plant, of the present invention or a part thereof preferably 95%, more preferred are 98%, even more preferred are 99.00%, in particular 99.10%, 99.30%, 99.50%, 99.70%, 99.90%, 99.99%, 99.999% or more. Most preferable the “reference”, “control”, or “wild type” is preferably a subject, e.g. an organelle, a cell, a tissue, an organism, which is genetically identical to the organism, cell organelle used according to the process of the invention except that nucleic acid molecules or the gene product encoded by them are changed according to the inventive process.

[0029] Preferably, the reference, control or wild type differs form the subject of the present invention only in the cellular activity of the polypeptide or RNA of the invention, e.g. as result of a reduction, decrease or deletion in the level of the nucleic acid molecule of the present invention or a reduction, decrease or deletion of the specific activity of the polypeptide or RNA of the invention, e.g. by or in the expression level or activity of protein or RNA that means its biological activity and/or its biochemical or genetical causes.

[0030] The term “expression” means the transcription of a gene into structural RNA (rRNA, tRNA, miRNA) or messenger RNA (mRNA) with the subsequent translation of the latter into a protein. Experimentally, expression can be detected by e.g. Northern, qRT PCR, transcriptional run-on assays or Western blotting and other immuno assays. As consequence of the reduction, decrease or deletion of the expression that means as consequence of the reduced, decreased or deleted transcription of a gene a related phenotypic trait appears such as the enhanced or increased stress tolerance.

[0031] Accordingly, preferred reference subject is the starting subject of the present process of the invention. Preferably, the reference and the subject matter of the invention are compared after standardization and normalization, e.g. to the amount of total RNA, DNA, or Protein or activity or expression of reference genes, like housekeeping genes, such as ubiquitin.

[0032] A series of mechanisms exists via which a modification in the polypeptide of the invention can directly or indirectly affect stress tolerance. For example, the molecule number or the specific activity of the polypeptide of the invention or the number of expression of the nucleic acid molecule of the invention may be reduced, decreased or deleted. However, it is also possible to reduce, decrease or delete the expression of the gene which is naturally present in the organisms, for example by modifying the regulation of the gene, or by reducing or decreasing the stability of the mRNA or of the gene product encoded by the nucleic acid molecule of the invention.

[0033] This also applies analogously to the combined reduction, decrease or deletion of the expression of the nucleic acid molecule of the present invention or its gene product together with the manipulation of further acitivities such as enzymes wich confer stress tolerance.

[0034] The reduction, decrease, deletion or modulation according to this invention can be constitutive, e.g. due to a stable permanent transgenic expression or to a stable mutation in the corresponding endogenous gene encoding the nucleic acid molecule of the invention or to a modulation of the expression or of the behaviour of a gene conferring the expression of the polypeptide of the invention, or transient, e.g. due to an transient transformation, a transiently active promotor or temporary addition of a modulator such as an antagonist or inductor, e.g. after transformation with a inducible construct carrying a double-stranded RNA nucleic acid molecule, an antisense nucleic acid molecule, a ribozyme of the invention etc. under control of a inducible promoter and adding the inducer, e.g. tetracycline or as described herein below.

[0035] The reduction, decrease or deletion in activity amounts preferably by at least 10%, preferably by at least 30% or at least 60%, especially preferably by at least 70%, 80%, 85%, 90% or more, very especially preferably are at least 95%, more preferably are at least 99% or more in comparison to the control, reference or wild type. Most preferably the reduction, decrease or deletion in activity amounts to 100%.

[0036] In this context, inactivation means that the enzymatic or biological activity of the polypeptides encoded is no longer detectable in the organism or in the cell such as, for example, within the plant or plant cell. For the purposes of the invention, downregulation (=reduction) means that the enzymatic or biological activity of the polypeptides encoded is partly or essentially completely reduced in comparison with the activity of the untreated organism. This can be achieved by different cell-biological mechanisms. In this context, the activity can be downregulated in the entire organism or, in the case of multi-celled organisms, in individual parts of the organism, in the case of plants for example in tissues such as the seed, the leaf, the root or other parts. In this context, the enzymatic activity or biological activity is reduced by at least 10%, advantageously at least 20%, preferably at least 30%, especially preferably at least 40%, 50% or 60%, very especially preferably at least 70%, 80%, 85% or 90% or more, very especially preferably are at least 95%, more preferably are at least 99% or more in comparison to the control, reference or wild type. Most preferably the reduction, decrease or deletion in activity amounts to 100%.

[0037] Various strategies for reducing the quantity (=expression), the activity or the function of proteins encoded by the nucleic acids or the nucleic acid sequences itself according to the invention are encompassed in accordance with the invention. The skilled worker will recognize that a series of different methods are available for influencing the quantity of a protein, the activity or the function in the desired manner.

[0038] The term “biological activity” means the biological function of the protein of the invention. In contrast to the term “biological activity” the term “activity” means the increase in the production of the compound produced by the inventive process. The term “biological activity” preferably refers to the enzymatic function, transporter carrier function, DNA-packaging function, heat shock protein function, recombination protein function, beta-galactosidase function, Serine/threonine-protein kinase CTR1 function, lipase function, enoyl-CoA hydratase function, UDP-glucose glucosyltransferase function, cell division protein function, flavonol synthase function, tracylglycerol lipase, MADS-box protein function, pectinesterase function, pectin methylesterase function, calcium transporting ATPase function, protein kinase function, lysophospholipase function, Chlorophyll A-B binding proteins function, Ca2+-transporting ATPase-like protein function, peroxidase function, disease resistance RPP5 like protein function, or regulatory function of a peptide or protein in an organism, a tissue, a cell or a cell compartment. Suitable substrates are low-molecular-weight compounds and also the protein interaction partners of a protein. The term “reduction” of the biological function refers, for example, to the quantitative reduction in binding capacity or binding strength of a protein for at least one substrate in an organism, a tissue, a cell or a cell compartment—for example by one of the methods described herein below—in comparison with the wild type of the same genus and species to which this method has not been applied, under otherwise identical conditions (such as, for example, culture conditions, age of the plants and the like). Reduction is also understood as meaning the modification of the substrate specificity as can be expressed for example, by the kcat/Km value. In this context, a reduction of the function of at least 10%, advantageously of at least 20%, preferably at least 30%, especially preferably of at least 40%, 50% or 60%, very especially preferably of at least 70%, 80%, 90% or 95%, in comparison with the untreated organism is advantageous. A particularly advantageous embodiment is the inactivation of the function. Binding partners for the protein can be identified in the manner with which the skilled worker is familiar, for example by the yeast 2-hybrid system.

[0039] A modification, i.e. a decrease, can be caused by endogenous or exogenous factors. For example, a decrease in activity in an organism or a part thereof can be caused by adding a chemical compound such as an antagonist to the media, nutrition, soil of the plants or to the plants themselves.

[0040] The transformed plant cells are compared to the corresponding non-transformed wild type of the same genus and species under otherwise identical conditions (such as, for example, culture conditions, age of the plants and the like). In this context, a change of at least 10%, advantageously of at least 20%, preferably at least 30%, especially preferably of at least 40%, 50% or 60%, very especially preferably of at least 70%, 80%, 90%, 95% or even 100% or more, in comparison with the non-transformed organism is advantageous.

[0041] In the invention inactivation or down-regulation of a gene in the plant cell results in altered metabolic activity as compared to a corresponding non-transformed wild type plant cell. One preferred wild type plant cell is a non-transformed Arabidopsis plant cell. An example here is the Arabidopsis wild type C24 (Nottingham Arabidopsis Stock Centre, UK; NASC Stock N906).

[0042] Other preferred wild type plant cells are a non-transformed from plants selected from the group consisting of maize, wheat, rye, oat, triticale, rice, barley, soybean, peanut, cotton, rapeseed, canola, manihot, pepper, sunflower, flax, borage, safflower, linseed, primrose, rapeseed, turnip rape, tagetes, solanaceous plants, potato, tobacco, eggplant, tomato, Vicia species, pea, alfalfa, coffee, cacao, tea, Salix species, oil palm, coconut, perennial grass and forage crops.

[0043] More preferred wild type plant cells are a non-transformed Linum plant cell, preferably Linum usitatissimum, more preferably the variety Brigitta, Golda, Gold Merchant, Helle, Juliel, Olpina, Livia, Marlin, Maedgold, Sporpion, Serenade, Linus, Taunus, Lifax or Liviola, a non-transformed Heliantus plant cell, preferably Heliantus annuus, more preferably the variety Aurasol, Capella, Flavia, Flores, Jazzy, Palulo, Pegasol, PIR64A54, Rigasol, Sariuca, Sideral, Sunny, Alenka, Candisol or Floyd, or a non-transformed Brassica plant cell, preferably Brassica napus, more preferably the variety Dorothy, Evita, Heros, Hyola, Kimbar, Lambada, Licolly, Liconira, Licosmos, Lisonne, Mistral, Passat, Serator, Siapula, Sponsor, Star, Caviar, Hybridol, Baical, Olga, Lara, Doublol, Karola, Falcon, Spirit, Olymp, Zeus, Libero, Kyola, Licord, Lion, Lirajet, Lisbeth, Magnum, Maja, Mendel, Mica, Mohican, Olpop, Ontarion, Panthar, Prinoe, Pronio, Susanna, Talani, Titan, Transfer, Wiking, Woltan, Zeniah, Artus, Contact or Smart.

[0044] Inactivation or down-regulation of a gene is advantageous since no new gene must be introduced to achieve the altered metabolic activity resulting in increased tolerance and/or resistance to environmental stress. Only an endogenous gene is hindered in its expression.

[0045] The inactivated or down-regulated gene or genes directly or indirectly influence the stress tolerance of plants, preferably the metabolic activity of the transformed plant cells.

[0046] Stress tolerance may be conferred by one or more inactivated or down-regulated genes encoded by one or more nucleic acid sequences selected from the group consisting of
[0047] a) nucleic acid molecule encoding on of the polypeptides shown in SEQ ID NO: 2, 4, 6, 8, 10, 12, 14, 16, 18, 20, 22, 24, 26, 28, 30, 32, 34, 36, 38, 40, 42, 44, 46, 48, 50, 52, 54, 56, 58, 60, 62, 64, 66, 68, 70, 72, 74, 76, 78, 80 and/or 82
   [0048] and/or 96, 98, 100, 102, 104, 106, 108, 110, 112, 114, 116, 118, 120, 122, 124, 126, 128, 130, 132, 134, 136, 138, 140, 142, 144, 146, 148, 150, 152, 154, 156, 158, 160, 162, 164, 166, 168, 170, 172, 174, 176, 178, 180, 182, 184, 186, 188, 190, 192, 194, 196, 198, 200, 202, 204, 206, 208, 210, 212, 214, 216, 218, 220, 222, 224, 226, 228, 230, 232, 234, 236, 238, 240, 242, 244, 246, 248, 250, 252, 254, 256, 258, 260, 262, 264, 266, 268, 270, 272, 274, 276, 278, 280, 282, 284, 286, 288, 290, 292, 294, 296, 298, 300, 302, 304, 306, 308, 310, 312, 314, 316, 318, 320, 322, 324, 326, 328, 330, 332, 334, 336, 338, 340, 342, 344, 346, 348, 350, 352, 354, 356, 358, 360, 362, 364, 366, 368, 370, 372, 374, 376, 378, 380, 382, 384, 386, 388, 390, 392, 394, 396, 398, 400, 402, 404, 406, 408, 410, 412, 414, 416, 418, 420, 422, 424, 426, 428, 430, 432, 434, 436, 438, 440, 442, 444, 446, 448, 450, 452, 454, 456, 458, 460, 462, 464, 466, 468, 470, 472, 474, 476, 478, 480, 482, 484, 486, 488, 490, 492, 494, 496, 498, 500, 502, 504, 506, 508, 510, 512, 514, 516, 518, 520, 522, 524, 526, 528, 530, 532, 534, 536, 538, 540, 542, 544, 546, 548, 550, 552, 554, 556, 558, 560, 562, 564, 566, 568, 570, 572, 574, 576, 578, 580, 582, 584, 586, 588, 590, 592, 594, 596, 598, 600, 602, 604, 606, 608, 610, 612, 614, 616, 618, 620, 622, 624, 626, 628, 630, 632, 634, 636, 638, 640, 642, 644, 646, 648, 650, 652, 654, 656, 658, 660, 662, 664, 666, 668, 670, 672, 674, 676, 678, 680, 682, 684, 686, 688, 690, 692, 694, 696, 698, 700, 702, 704, 706, 708, 710, 712, 714, 716, 718, 720, 722, 724, 726, 728, 730, 732, 734, 736, 738, 740, 742, 744, 746, 748, 750, 752, 754, 756, 758, 760, 762, 764, 766, 768, 770, 772, 774, 776, 778, 780, 782, 784, 786, 788, 790, 792, 794, 796, 798, 800, 802, 804, 806, 808, 810, 812, 814, 816, 818, 820, 822, 824, 826, 828, 830, 832, 834, 836, 838, 840, 842, 844, 846, 848, 850, 852, 854, 856, 858, 860, 862, 864, 866 and/or 868;
[0049] b) nucleic acid molecule comprising a nucleic acid sequence, which, as a result of the degeneracy of the genetic code, can be derived from a polypeptide sequence depicted in SEQ ID NO: 2, 4, 6, 8, 10, 12, 14, 16, 18, 20, 22, 24, 26, 28, 30, 32, 34, 36, 38, 40, 42, 44, 46, 48, 50, 52, 54, 56, 58, 60, 62, 64, 66, 68, 70, 72, 74, 76, 78, 80 and/or 82
   [0050] and/or 96, 98, 100, 102, 104, 106, 108, 110, 112, 114, 116, 118, 120, 122, 124, 126, 128, 130, 132, 134, 136, 138, 140, 142, 144, 146, 148, 150, 152, 154, 156, 158, 160, 162, 164, 166, 168, 170, 172, 174, 176, 178, 180, 182, 184, 186, 188, 190, 192, 194, 196, 198, 200, 202, 204, 206, 208, 210, 212, 214, 216, 218, 220, 222, 224, 226, 228, 230, 232, 234, 236, 238, 240, 242, 244, 246, 248, 250, 252, 254, 256, 258, 260, 262, 264, 266, 268, 270, 272, 274, 276, 278, 280, 282, 284, 286, 288, 290, 292, 294, 296, 298, 300, 302, 304, 306, 308, 310, 312, 314, 316, 318, 320, 322, 324, 326, 328, 330, 332, 334, 336, 338, 340, 342, 344, 346, 348, 350, 352, 354, 356, 358, 360, 362, 364, 366, 368, 370, 372, 374, 376, 378, 380, 382, 384, 386, 388, 390, 392, 394, 396, 398, 400, 402, 404, 406, 408, 410, 412, 414, 416, 418, 420, 422, 424, 426, 428, 430, 432, 434, 436, 438, 440, 442, 444, 446, 448, 450, 452, 454, 456, 458, 460, 462, 464, 466, 468, 470, 472, 474, 476, 478, 480, 482, 484, 486, 488, 490, 492, 494, 496, 498, 500, 502, 504, 506, 508, 510, 512, 514, 516, 518, 520, 522, 524, 526, 528, 530, 532, 534, 536, 538, 540, 542, 544, 546, 548, 550, 552, 554, 556, 558, 560, 562, 564, 566, 568, 570, 572, 574, 576, 578, 580, 582, 584, 586, 588, 590, 592, 594, 596, 598, 600, 602, 604, 606, 608, 610, 612, 614, 616, 618, 620, 622, 624, 626, 628, 630, 632, 634, 636, 638, 640, 642, 644, 646, 648, 650, 652, 654, 656, 658, 660, 662, 664, 666, 668, 670, 672, 674, 676, 678, 680, 682, 684, 686, 688, 690, 692, 694, 696, 698, 700, 702, 704, 706, 708, 710, 712, 714, 716, 718, 720, 722, 724, 726, 728, 730, 732, 734, 736, 738, 740, 742, 744, 746, 748, 750, 752, 754, 756, 758, 760, 762, 764, 766, 768, 770, 772, 774, 776, 778, 780, 782, 784, 786, 788, 790, 792, 794, 796, 798, 800, 802, 804, 806, 808, 810, 812, 814, 816, 818, 820, 822, 824, 826, 828, 830, 832, 834, 836, 838, 840, 842, 844, 846, 848, 850, 852, 854, 856, 858, 860, 862, 864, 866 and/or 868;
[0051] c) nucleic acid molecule encoding a polypeptide having at least 50% identity with the amino acid sequence of the polypeptide encoded by the nucleic acid molecule of (a) to (c) and having the biological activity represented by protein according to SEQ ID NO: 2, 4, 6, 8, 10, 12, 14, 16, 18, 20, 22, 24, 26, 28, 30, 32, 34, 36, 38, 40, 42, 44, 46, 48, 50, 52, 54, 56, 58, 60, 62, 64, 66, 68, 70, 72, 74, 76, 78, 80 and/or 82
   [0052] and/or 96, 98, 100, 102, 104, 106, 108, 110, 112, 114, 116, 118, 120, 122, 124, 126, 128, 130, 132, 134, 136, 138, 140, 142, 144, 146, 148, 150, 152, 154, 156, 158, 160, 162, 164, 166, 168, 170, 172, 174, 176, 178, 180, 182, 184, 186, 188, 190, 192, 194, 196, 198, 200, 202, 204, 206, 208, 210, 212, 214, 216, 218, 220, 222, 224, 226, 228, 230, 232, 234, 236, 238, 240, 242, 244, 246, 248, 250, 252, 254, 256, 258, 260, 262, 264, 266, 268, 270, 272, 274, 276, 278, 280, 282, 284, 286, 288, 290, 292, 294, 296, 298, 300, 302, 304, 306, 308, 310, 312, 314, 316, 318, 320, 322, 324, 326, 328, 330, 332, 334, 336, 338, 340, 342, 344, 346, 348, 350, 352, 354, 356, 358, 360, 362, 364, 366, 368, 370, 372, 374, 376, 378, 380, 382, 384, 386, 388, 390, 392, 394, 396, 398, 400, 402, 404, 406, 408, 410, 412, 414, 416, 418, 420, 422, 424, 426, 428, 430, 432, 434, 436, 438, 440, 442, 444, 446, 448, 450, 452, 454, 456, 458, 460, 462, 464, 466, 468, 470, 472, 474, 476, 478, 480, 482, 484, 486, 488, 490, 492, 494, 496, 498, 500, 502, 504, 506, 508, 510, 512, 514, 516, 518, 520, 522, 524, 526, 528, 530, 532, 534, 536, 538, 540, 542, 544, 546, 548, 550, 552, 554, 556, 558, 560, 562, 564, 566, 568, 570, 572, 574, 576, 578, 580, 582, 584, 586, 588, 590, 592, 594, 596, 598, 600, 602, 604, 606, 608, 610, 612, 614, 616, 618, 620, 622, 624, 626, 628, 630, 632, 634, 636, 638, 640, 642, 644, 646, 648, 650, 652, 654, 656, 658, 660, 662, 664, 666, 668, 670, 672, 674, 676, 678, 680, 682, 684, 686, 688, 690, 692, 694, 696, 698, 700, 702, 704, 706, 708, 710, 712, 714, 716, 718, 720, 722, 724, 726, 728, 730, 732, 734, 736, 738, 740, 742, 744, 746, 748, 750, 752, 754, 756, 758, 760, 762, 764, 766, 768, 770, 772, 774, 776, 778, 780, 782, 784, 786, 788, 790, 792, 794, 796, 798, 800, 802, 804, 806, 808, 810, 812, 814, 816, 818, 820, 822, 824, 826, 828, 830, 832, 834, 836, 838, 840, 842, 844, 846, 848, 850, 852, 854, 856, 858, 860, 862, 864, 866 and/or 868;
[0053] d) nucleic acid molecule encoding a polypeptide which is isolated with the aid of monoclonal antibodies against a polypeptide encoded by one of the nucleic acid molecules of (a) to (d) and having the biological activity represented by the protein according to SEQ ID NO: 2, 4, 6, 8, 10, 12, 14, 16, 18, 20, 22, 24, 26, 28, 30, 32, 34, 36, 38, 40, 42, 44, 46, 48, 50, 52, 54, 56, 58, 60, 62, 64, 66, 68, 70, 72, 74, 76, 78, 80 and/or 82;
[0054] e) nucleic acid molecule which is obtainable by screening a suitable nucleic acid library under stringent hybridisation conditions with a probe comprising one of the sequences of the nucleic acid molecule of (a) or (b) or with a fragment thereof having at least 15 nt, preferably 20 nt, 30 nt, 50 nt, 100 nt, 200 nt or 500 nt of the nucleic acid molecule characterized in (a) to (c) and encoding a polypeptide having the biological activity represented by protein whose reduction or deletion results in increased tolerance and/or resistance to an environmental stress or which comprises a sequence which is complementary thereto.

[0055] With the present invention it is possible to identify the genes encoded by a nucleic acid sequence selected from the group consisting of sequences according to SEQ ID NO: 1, 3, 5, 7, 9, 11, 13, 15, 17, 19, 21, 23, 25, 27, 29, 31, 33, 35, 37, 39, 41, 43, 45, 47, 49, 51, 53, 55, 57, 59, 61, 63, 65, 67, 69, 71, 73, 75, 77, 79 and/or 81

and/or 95, 97, 99, 101, 103, 105, 107, 109, 111, 113, 115, 117, 119, 121, 123, 125, 127, 129, 131, 133, 135, 137, 139, 141, 143, 145, 147, 149, 151, 153, 155, 157, 159, 161, 163, 165, 167, 169, 171, 173, 175, 177, 179, 181, 183, 185, 187, 189, 191, 193, 195, 197, 199, 201, 203, 205, 207, 209, 211, 213, 215, 217, 219, 221, 223, 225, 227, 229, 231, 233, 235, 237, 239, 241, 243, 245, 247, 249, 251, 253, 255, 257, 259, 261, 263, 265, 267, 269, 271, 273, 275, 277, 279, 281, 283, 285, 287, 289, 291, 293, 295, 297, 299, 301, 303, 305, 307, 309, 311, 313, 315, 317, 319, 321, 323, 325, 327, 329, 331, 333, 335, 337, 339, 341, 343, 345, 347, 349, 351, 353, 355, 357, 359, 361, 363, 365, 367, 369, 371, 373, 375, 377, 379, 381, 383, 385, 387, 389, 391, 393, 395, 397, 399, 401, 403, 405, 407, 409, 411, 413, 415, 417, 419, 421, 423, 425, 427, 429, 431, 433, 435, 437, 439, 441, 443, 445, 447, 449, 451, 453, 455, 457, 459, 461, 463, 465, 467, 469, 471, 473, 475, 477, 479, 481, 483, 485, 487, 489, 491, 493, 495, 497, 499, 501, 503, 505, 507, 509, 511, 513, 515, 517, 519, 521, 523, 525, 527, 529, 531, 533, 535, 537, 539, 541, 543, 545, 547, 549, 551, 553, 555, 557, 559, 561, 563, 565, 567, 569, 571, 573, 575, 577, 579, 581, 583, 585, 587, 589, 591, 593, 595, 597, 599, 601, 603, 605, 607, 609, 611, 613, 615, 617, 619, 621, 623, 625, 627, 629, 631, 633, 635, 637, 639, 641, 643, 645, 647, 649, 651, 653, 655, 657, 659, 661, 663, 665, 667, 669, 671, 673, 675, 677, 679, 681, 683, 685, 687, 689, 691, 693, 695, 697, 699, 701, 703, 705, 707, 709, 711, 713, 715, 717, 719, 721, 723, 725, 727, 729, 731, 733, 735, 737, 739, 741, 743, 745, 747, 749, 751, 753, 755, 757, 759, 761, 763, 765, 767, 769, 771, 773, 775, 777, 779, 781, 783, 785, 787, 789, 791, 793, 795, 797, 799, 801, 803, 805, 807, 809, 811, 813, 815, 817, 819, 821, 823, 825, 827, 829, 831, 833, 835, 837, 839, 841, 843, 845, 847, 849, 851, 853, 855, 857, 859, 861, 863, 865 and/or 867 and/or homologs thereof in target plants, especially crop plants, and then inactivate or down-regulate the corresponding gene to achieve an increased tolerance and/or resistance to environmental stress (preferably by the altered metabolic activity). Consequently the invention is not limited to a specific plant.

[0056] For the purpose of the present invention the SEQ ID NOs and the expression:

SEQ ID NO: 1, 3, 5, 7, 9, 11, 13, 15, 17, 19, 21, 23, 25, 27, 29, 31, 33, 35, 37, 39, 41, 43, 45, 47, 49, 51, 53, 55, 57, 59, 61, 63, 65, 67, 69, 71, 73, 75, 77, 79 and/or 81; and/or
95, 97, 99, 101, 103, 105, 107, 109, 111, 113, 115, 117, 119, 121, 123, 125, 127, 129, 131, 133, 135, 137, 139, 141, 143, 145, 147, 149, 151, 153, 155, 157, 159, 161, 163, 165, 167, 169, 171, 173, 175, 177, 179, 181, 183, 185, 187, 189, 191, 193, 195, 197, 199, 201, 203, 205, 207, 209, 211, 213, 215, 217, 219, 221, 223, 225, 227, 229, 231, 233, 235, 237, 239, 241, 243, 245, 247, 249, 251, 253, 255, 257, 259, 261, 263, 265, 267, 269, 271, 273, 275, 277, 279, 281, 283, 285, 287, 289, 291, 293, 295, 297, 299, 301, 303, 305, 307, 309, 311, 313, 315, 317, 319, 321, 323, 325, 327, 329, 331, 333, 335, 337, 339, 341, 343, 345, 347, 349, 351, 353, 355, 357, 359, 361, 363, 365, 367, 369, 371, 373, 375, 377, 379, 381, 383, 385, 387, 389, 391, 393, 395, 397, 399, 401, 403, 405, 407, 409, 411, 413, 415, 417, 419, 421, 423, 425, 427, 429, 431, 433, 435, 437, 439, 441, 443, 445, 447, 449, 451, 453, 455, 457, 459, 461, 463, 465, 467, 469, 471, 473, 475, 477, 479, 481, 483, 485, 487, 489, 491, 493, 495, 497, 499, 501, 503, 505, 507, 509, 511, 513, 515, 517, 519, 521, 523, 525, 527, 529, 531, 533, 535, 537, 539, 541, 543, 545, 547, 549, 551, 553, 555, 557, 559, 561, 563, 565, 567, 569, 571, 573, 575, 577, 579, 581, 583, 585, 587, 589, 591, 593, 595, 597, 599, 601, 603, 605, 607, 609, 611, 613, 615, 617, 619, 621, 623, 625, 627, 629, 631, 633, 635, 637, 639, 641, 643, 645, 647, 649, 651, 653, 655, 657, 659, 661, 663, 665, 667, 669, 671, 673, 675, 677, 679, 681, 683, 685, 687, 689, 691, 693, 695, 697, 699, 701, 703, 705, 707, 709, 711, 713, 715, 717, 719, 721, 723, 725, 727, 729, 731, 733, 735, 737, 739, 741, 743, 745, 747, 749, 751, 753, 755, 757, 759, 761, 763, 765, 767, 769, 771, 773, 775, 777, 779, 781, 783, 785, 787, 789, 791, 793, 795, 797, 799, 801, 803, 805, 807, 809, 811, 813, 815, 817, 819, 821, 823, 825, 827, 829, 831, 833, 835, 837, 839, 841, 843, 845, 847, 849, 851, 853, 855, 857, 859, 861, 863, 865 and/or 867 are summarized and named as “SEQ ID NO: (2n+1) for n=0 to 40 and for n=47 to 433”.

[0057] This means, throughout the instant specification the term:

SEQ ID NO: 1, 3, 5, 7, 9, 11, 13, 15, 17, 19, 21, 23, 25, 27, 29, 31, 33, 35, 37, 39, 41, 43, 45, 47, 49, 51, 53, 55, 57, 59, 61, 63, 65, 67, 69, 71, 73, 75, 77, 79 and/or 81; and/or
95, 97, 99, 101, 103, 105, 107, 109, 111, 113, 115, 117, 119, 121, 123, 125, 127, 129, 131, 133, 135, 137, 139, 141, 143, 145, 147, 149, 151, 153, 155, 157, 159, 161, 163, 165, 167, 169, 171, 173, 175, 177, 179, 181, 183, 185, 187, 189, 191, 193, 195, 197, 199, 201, 203, 205, 207, 209, 211, 213, 215, 217, 219, 221, 223, 225, 227, 229, 231, 233, 235, 237, 239, 241, 243, 245, 247, 249, 251, 253, 255, 257, 259, 261, 263, 265, 267, 269, 271, 273, 275, 277, 279, 281, 283, 285, 287, 289, 291, 293, 295, 297, 299, 301, 303, 305, 307, 309, 311, 313, 315, 317, 319, 321, 323, 325, 327, 329, 331, 333, 335, 337, 339, 341, 343, 345, 347, 349, 351, 353, 355, 357, 359, 361, 363, 365, 367, 369, 371, 373, 375, 377, 379, 381, 383, 385, 387, 389, 391, 393, 395, 397, 399, 401, 403, 405, 407, 409, 411, 413, 415, 417, 419, 421, 423, 425, 427, 429, 431, 433, 435, 437, 439, 441, 443, 445, 447, 449, 451, 453, 455, 457, 459, 461, 463, 465, 467, 469, 471, 473, 475, 477, 479, 481, 483, 485, 487, 489, 491, 493, 495, 497, 499, 501, 503, 505, 507, 509, 511, 513, 515, 517, 519, 521, 523, 525, 527, 529, 531, 533, 535, 537, 539, 541, 543, 545, 547, 549, 551, 553, 555, 557, 559, 561, 563, 565, 567, 569, 571, 573, 575, 577, 579, 581, 583, 585, 587, 589, 591, 593, 595, 597, 599, 601, 603, 605, 607, 609, 611, 613, 615, 617, 619, 621, 623, 625, 627, 629, 631, 633, 635, 637, 639, 641, 643, 645, 647, 649, 651, 653, 655, 657, 659, 661, 663, 665, 667, 669, 671, 673, 675, 677, 679, 681, 683, 685, 687, 689, 691, 693, 695, 697, 699, 701, 703, 705, 707, 709, 711, 713, 715, 717, 719, 721, 723, 725, 727, 729, 731, 733, 735, 737, 739, 741, 743, 745, 747, 749, 751, 753, 755, 757, 759, 761, 763, 765, 767, 769, 771, 773, 775, 777, 779, 781, 783, 785, 787, 789, 791, 793, 795, 797, 799, 801, 803, 805, 807, 809, 811, 813, 815, 817, 819, 821, 823, 825, 827, 829, 831, 833, 835, 837, 839, 841, 843, 845, 847, 849, 851, 853, 855, 857, 859, 861, 863, 865 and/or 867”
and the term “SEQ ID NO: (2n+1) for n=0 to 40 and for n=47 to 433” are identical and interchangeably in the present context.

[0058] For the purpose of the present invention, the SEQ ID NOs and the expression:

SEQ ID NO: 2, 4, 6, 8, 10, 12, 14, 16, 18, 20, 22, 24, 26, 28, 30, 32, 34, 36, 38, 40, 42, 44, 46, 48, 50, 52, 54, 56, 58, 60, 62, 64, 66, 68, 70, 72, 74, 76, 78, 80 and/or 82, and/or
96, 98, 100, 102, 104, 106, 108, 110, 112, 114, 116, 118, 120, 122, 124, 126, 128, 130, 132, 134, 136, 138, 140, 142, 144, 146, 148, 150, 152, 154, 156, 158, 160, 162, 164, 166, 168, 170, 172, 174, 176, 178, 180, 182, 184, 186, 188, 190, 192, 194, 196, 198, 200, 202, 204, 206, 208, 210, 212, 214, 216, 218, 220, 222, 224, 226, 228, 230, 232, 234, 236, 238, 240, 242, 244, 246, 248, 250, 252, 254, 256, 258, 260, 262, 264, 266, 268, 270, 272, 274, 276, 278, 280, 282, 284, 286, 288, 290, 292, 294, 296, 298, 300, 302, 304, 306, 308, 310, 312, 314, 316, 318, 320, 322, 324, 326, 328, 330, 332, 334, 336, 338, 340, 342, 344, 346, 348, 350, 352, 354, 356, 358, 360, 362, 364, 366, 368, 370, 372, 374, 376, 378, 380, 382, 384, 386, 388, 390, 392, 394, 396, 398, 400, 402, 404, 406, 408, 410, 412, 414, 416, 418, 420, 422, 424, 426, 428, 430, 432, 434, 436, 438, 440, 442, 444, 446, 448, 450, 452, 454, 456, 458, 460, 462, 464, 466, 468, 470, 472, 474, 476, 478, 480, 482, 484, 486, 488, 490, 492, 494, 496, 498, 500, 502, 504, 506, 508, 510, 512, 514, 516, 518, 520, 522, 524, 526, 528, 530, 532, 534, 536, 538, 540, 542, 544, 546, 548, 550, 552, 554, 556, 558, 560, 562, 564, 566, 568, 570, 572, 574, 576, 578, 580, 582, 584, 586, 588, 590, 592, 594, 596, 598, 600, 602, 604, 606, 608, 610, 612, 614, 616, 618, 620, 622, 624, 626, 628, 630, 632, 634, 636, 638, 640, 642, 644, 646, 648, 650, 652, 654, 656, 658, 660, 662, 664, 666, 668, 670, 672, 674, 676, 678, 680, 682, 684, 686, 688, 690, 692, 694, 696, 698, 700, 702, 704, 706, 708, 710, 712, 714, 716, 718, 720, 722, 724, 726, 728, 730, 732, 734, 736, 738, 740, 742, 744, 746, 748, 750, 752, 754, 756, 758, 760, 762, 764, 766, 768, 770, 772, 774, 776, 778, 780, 782, 784, 786, 788, 790, 792, 794, 796, 798, 800, 802, 804, 806, 808, 810, 812, 814, 816, 818, 820, 822, 824, 826, 828, 830, 832, 834, 836, 838, 840, 842, 844, 846, 848, 850, 852, 854, 856, 858, 860, 862, 864, 866 and/or 868 are summarized and named as “SEQ ID NO: (2n+2) for n=0 to 40 and for n=47 to 433”.

[0059] This means, throughout the instant specification the term: “SEQ ID NO: 2, 4, 6, 8, 10, 12, 14, 16, 18, 20, 22, 24, 26, 28, 30, 32, 34, 36, 38, 40, 42, 44, 46, 48, 50, 52, 54, 56, 58, 60, 62, 64, 66, 68, 70, 72, 74, 76, 78, 80 and/or 82; and/or

96, 98, 100, 102, 104, 106, 108, 110, 112, 114, 116, 118, 120, 122, 124, 126, 128, 130, 132, 134, 136, 138, 140, 142, 144, 146, 148, 150, 152, 154, 156, 158, 160, 162, 164, 166, 168, 170, 172, 174, 176, 178, 180, 182, 184, 186, 188, 190, 192, 194, 196, 198, 200, 202, 204, 206, 208, 210, 212, 214, 216, 218, 220, 222, 224, 226, 228, 230, 232, 234, 236, 238, 240, 242, 244, 246, 248, 250, 252, 254, 256, 258, 260, 262, 264, 266, 268, 270, 272, 274, 276, 278, 280, 282, 284, 286, 288, 290, 292, 294, 296, 298, 300, 302, 304, 306, 308, 310, 312, 314, 316, 318, 320, 322, 324, 326, 328, 330, 332, 334, 336, 338, 340, 342, 344, 346, 348, 350, 352, 354, 356, 358, 360, 362, 364, 366, 368, 370, 372, 374, 376, 378, 380, 382, 384, 386, 388, 390, 392, 394, 396, 398, 400, 402, 404, 406, 408, 410, 412, 414, 416, 418, 420, 422, 424, 426, 428, 430, 432, 434, 436, 438, 440, 442, 444, 446, 448, 450, 452, 454, 456, 458, 460, 462, 464, 466, 468, 470, 472, 474, 476, 478, 480, 482, 484, 486, 488, 490, 492, 494, 496, 498, 500, 502, 504, 506, 508, 510, 512, 514, 516, 518, 520, 522, 524, 526, 528, 530, 532, 534, 536, 538, 540, 542, 544, 546, 548, 550, 552, 554, 556, 558, 560, 562, 564, 566, 568, 570, 572, 574, 576, 578, 580, 582, 584, 586, 588, 590, 592, 594, 596, 598, 600, 602, 604, 606, 608, 610, 612, 614, 616, 618, 620, 622, 624, 626, 628, 630, 632, 634, 636, 638, 640, 642, 644, 646, 648, 650, 652, 654, 656, 658, 660, 662, 664, 666, 668, 670, 672, 674, 676, 678, 680, 682, 684, 686, 688, 690, 692, 694, 696, 698, 700, 702, 704, 706, 708, 710, 712, 714, 716, 718, 720, 722, 724, 726, 728, 730, 732, 734, 736, 738, 740, 742, 744, 746, 748, 750, 752, 754, 756, 758, 760, 762, 764, 766, 768, 770, 772, 774, 776, 778, 780, 782, 784, 786, 788, 790, 792, 794, 796, 798, 800, 802, 804, 806, 808, 810, 812, 814, 816, 818, 820, 822, 824, 826, 828, 830, 832, 834, 836, 838, 840, 842, 844, 846, 848, 850, 852, 854, 856, 858, 860, 862, 864, 866 and/or 868 and the term “SEQ ID NO: (2n+2) for n=0 to 40 and for n=47 to 433” are identical and interchangeably in the present context.

[0060] It is further possible to detect environmental stress in plant cells or plants by screening the plant cells for altered metabolic activity as compared to non-stress conditions. This allows for monitoring of stress levels in plants, even when no symptoms are visible. Therefore counter action can be taken earlier and e.g. crop losses minimized by timely watering.

[0061] It is also within the scope of the invention to screen plant cells or plants for increased tolerance and/or resistance to environmental stress by screening the plant cells under stress conditions for increased tolerance and/or resistance to environmental stress as compared to non-stress conditions. This allows selection of plants with increased tolerance and/or resistance to environmental stress without the identification of genes or visual symptoms.

[0062] With the invention it is further possible to breed plant cells or plants towards increased tolerance and/or resistance to environmental stress by screening the plant cells under stress conditions for increased tolerance and/or resistance to environmental stress as compared to non-stress conditions and selecting those with increased tolerance and/or resistance to environmental stress. The screening for stress tolerance is faster and easier than e.g. screening for genes.

[0063] Screening is well known to those skilled in the art and generally refers to the search for a particular attribute or trait. In the invention this trait in a plant or plant cell is preferably the concentration of a metabolite or estimate the general appearance. The methods and devices for screening are familiar to those skilled in the art and include GC (gas chromatography), LC (liquid chromatography), HPLC (high performance (pressure) liquid chromatography), MS (mass spectrometry), NMR (nuclear magnetic resonance) spectroscopy, IR (infra red) spectroscopy, photometric methods etc and combinations of these methods.

[0064] Breeding is also customary knowledge for those skilled in the art. It is understood as the directed and stable incorporation of a particular attribute or trait into a plant or plant cell.

[0065] The various breeding steps are characterized by well-defined human intervention such as selecting the lines to be crossed, directing pollination of the parental lines, or selecting appropriate progeny plants. Different breeding measures can be taken, depending on the desired properties. All the techniques are well known by a person skilled in the art and include for example, but are not limited to hybridization, inbreeding, backcross breeding, multiline breeding, variety blend, interspecific hybridization, aneuploid techniques, etc. Hybridization techniques also can include the sterilization of plants to yield male or female sterile plants by mechanical, chemical, or biochemical means. Cross pollination of a male sterile plant with pollen of a different line assures that the genome of the male sterile but female fertile plant will uniformly obtain properties of both of the parental lines. The transgenic seeds and plants according to the invention can therefor be used for the breeding of improved plant lines, which can increase the effectiveness of conventional methods such as herbicide or pesticide treatment or which allow one to dispense with said methods due to their modified genetic properties. Alternatively new crops with improved stress tolerance, preferably drought and temperature, can be obtained, which, due to their optimized genetic “equipment”, yield harvested product of better quality than products that were not able to tolerate comparable adverse developmental conditions.

[0066] Environmental stress includes but is not limited to salinity, drought, temperature, metal, chemical, pathogenic and oxidative stress, or combinations thereof, preferably drought and/or temperature.

[0067] As used herein, the term “environmental stress” refers to any sub-optimal growing condition and includes, but is not limited to, sub-optimal conditions associated with salinity, drought, temperature, metal, chemical, pathogenic and oxidative stresses, or combinations thereof. In preferred embodiments, environmental stress may be salinity, drought, heat, or low temperature, or combinations thereof, and in particular, may be low water content or low temperature. Wherein drought stress means any environmental stress which leads to a lack of water in plants or reduction of water supply to plants, wherein low temperature stress means freezing of plants below +4° C. as well as chilling of plants below 15° C. and wherein high temperature stress means for example a temperature above 35° C. The range of stress and stress response depends on the different plants which are used for the invention, i.e. it differs for example between a plant such as wheat and a plant such as Arabidopsis. It is also to be understood that as used in the specification and in the claims, “a” or “an” can mean one or more, depending upon the context in which it is used. Thus, for example, reference to “a cell” means that at least one cell may be utilized.

[0068] The invention also provides a transformed plant cell with one or more nucleic acid sequences homologous to one or more of sequences of SEQ ID NO: (2n+1) for n=0 to 40 and for n=47 to 433, wherein the plant is selected from the group comprised of maize, wheat, rye, oat, triticale, rice, barley, soybean, peanut, cotton, rapeseed, canola, manihot, pepper, sunflower, flax, borage, safflower, linseed, primrose, rapeseed, turnip rape, tagetes, solanaceous plants, potato, tobacco, eggplant, tomato, Vicia species, pea, alfalfa, coffee, cacao, tea, Salix species, oil palm, coconut, perennial grass, forage crops and Arabidopsis thaliana, preferably Brassica napus, Glycine max, Zea mays or Oryza sativa. The present invention further provides a transgenic plant cell with an inactivated or down-regulated gene selected from the group comprising sequences of SEQ ID NO: (2n+1) for n=0 to 40 and for n=47 to 433 and/or homologs thereof, preferably from Brassica napus, Glycine max, Zea mays or Oryza sativa.

[0069] Furthermore it is possible to identify the genes encoded by a nucleic acid sequence selected from the group consisting of sequences of SEQ ID NO: (2n+1) for n=0 to 40 and for n=47 to 433 and/or homologs thereof in target plants, especially crop plants, and then inactivate or down-regulate the corresponding gene to achieve increased tolerance and/or resistance to environmental stress. Consequently the invention is not limited to a specific plant.

[0070] The invention also provides a transformed plant cell with a nucleic acid sequence homologous to one of sequences of SEQ ID NO: (2n+1) for n=0 to 40 and for n=47 to 433, wherein the plant is selected from the group comprised of maize, wheat, rye, oat, triticale, rice, barley, soybean, peanut, cotton, rapeseed, canola, manihot, pepper, sunflower, flax, borage, safflower, linseed, primrose, rapeseed, turnip rape, tagetes, solanaceous plants, potato, tobacco, eggplant, tomato, Vicia species, pea, alfalfa, coffee, cacao, tea, Salix species, oil palm, coconut, perennial grass, forage crops and Arabidopsis thaliana, preferably Brassica napus, Glycine max, Zea mays or Oryza sativa.

[0071] Also the invention provides a transformed plant cell, wherein the nucleic acid or acids are at least about 30%, especially at least about 50% homologous to sequences of SEQ ID NO: (2n+1) for n=0 to 40 and for n=47 to 433.

[0072] According to the invention the transformed plant cell may be derived from a monocotyledonous or a dicotyledonous plant.

[0073] The monocotyledonous or a dicotyledonous plant may be selected from the group comprised of maize, wheat, rye, oat, triticale, rice, barley, soybean, peanut, cotton, rapeseed, canola, manihot, pepper, sunflower, flax, borage, safflower, linseed, primrose, rapeseed, turnip rape, tagetes, solanaceous plants, potato, tobacco, eggplant, tomato, Vicia species, pea, alfalfa, coffee, cacao, tea, Salix species, oil palm, coconut, perennial grass, forage crops and Arabidopsis thaliana, preferably Brassica napus, Glycine max, Zea mays or Oryza sativa.

[0074] The transformed plant cell may be derived from a gymnosperm plant and can preferably be selected from the group of spruce, pine and fir.

[0075] The invention also provides a transformed plant generated from said plant cell and which is a monocot or dicot plant.

[0076] The transformed plant may be selected from the group comprised of maize, wheat, rye, oat, triticale, rice, barley, soybean, peanut, cotton, rapeseed, canola, manihot, pepper, sunflower, flax, borage, safflower, linseed, primrose, rapeseed, turnip rape, tagetes, solanaceous plants, potato, tobacco, eggplant, tomato, Vicia species, pea, alfalfa, coffee, cacao, tea, Salix species, oil palm, coconut, perennial grass, forage crops and Arabidopsis thaliana, preferably Brassica napus, Glycine max, Zea mays or Oryza sativa.

[0077] Preferably the transformed plant generated from said plant cell is a gymnosperm plant, more preferred a plant selected from the group consisting of spruce, pine and fir.

[0078] The invention not only deals with plants but also with an agricultural product produced by any of the described transformed plants, plant parts such as leafs, petal, anther, roots, tubers, stems, buds, flowers or especially seeds produced by said transformed plant, which are at least genetically heterozygous, preferably homozygous for a gene or its homolog, that when inactivated or down-regulated confers an increased tolerance and/or resistance to environmental stress as compared to a wild type plant.

[0079] Homologs of the aforementioned sequences can be isolated advantageously from yeast, fungi, viruses, algae bacteria, such as Acetobacter (subgen. Acetobacter) aceti; Acidithiobacillus ferrooxidans; Acinetobacter sp.; Actinobacillus sp; Aeromonas salmonicida; Agrobacterium tumefaciens; Aquifex aeolicus; Arcanobacterium pyogenes; Aster yellows phytoplasma; Bacillus sp.; Bifidobacterium sp.; Borrelia burgdorferi; Brevibacterium linens; Brucelia melitensis; Buchnera sp.; Butyrivibrio fibrisolvens; Campylobacter jejuni; Caulobacter crescentus; Chlamydia sp.; Chlamydophila sp.; Chlorobium limicola; Citrobacter rodentium; Clostridium sp.; Comamonas testosteroni; Corynebacterium sp.; Coxiella burnetii; Deinococcus radiodurans; Dichelobacter nodosus; Edwardsiella ictaluri; Enterobacter sp.; Erysipelothrix rhusiopathiae; Escherichia coli; Flavobacterium sp.; Francisella tularensis; Frankia sp. Cpl1; Fusobacterium nucleatum; Geobacillus stearothermophilus; Gluconobacter oxydans; Haemophilus sp.; Helicobacter pylori; Klebsiella pneumoniae; Lactobacillus sp.; Lactococcus lactis; Listeria sp.; Mannheimia haemolytica; Mesorhizobium loti; Methylophaga thalassica; Microcystis aeruginosa; Microscilla sp. PRE1; Moraxella sp. TA144; Mycobacterium sp.; Mycoplasma sp.; Neisseria sp.; Nitrosomonas sp.; Nostoc sp. PCC 7120; Novosphingobium aromaticivorans; Oenococcus oeni; Pantoea citrea; Pasteurella multocida; Pediococcus pentosaceus; Phormidium foveolarum; Phytoplasma sp.; Plectonema boryanum; Prevotella ruminicola; Propionibacterium sp.; Proteus vulgaris; Pseudomonas sp.; Raistonia sp.; Rhizobium sp.; Rhodococcus equi; Rhodothermus marinus; Rickettsia sp.; Riemerella anatipestifer; Ruminococcus flavefaciens; Salmonella sp.; Selenomonas ruminantium; Serratia entomophila; Shigella sp.; Sinorhizobium meliloti; Staphylococcus sp.; Streptococcus sp.; Streptomyces sp.; Synechococcus sp.; Synechocystis sp. PCC 6803; Thermotoga maritima; Treponema sp.; Ureaplasma urealyticum; Vibrio cholerae; Vibrio parahaemolyticus; Xylella fastidiosa; Yersinia sp.; Zymomonas mobilis, preferably Salmonella sp. or Escherichia coli or plants, preferably from yeasts such as from the genera Saccharomyces, Pichia, Candida, Hansenula, Torulopsis or Schizosaccharomyces, or even more preferred from plants such as Arabidopsis thaliana, maize, wheat, rye, oat, triticale, rice, barley, soybean, peanut, cotton, borage, safflower, linseed, primrose, rapeseed, canola and turnip rape, manihot, pepper, sunflower, tagetes, solanaceous plant such as potato, tobacco, eggplant and tomato, Vicia species, pea, alfalfa, bushy plants such as coffee, cacao, tea, Salix species, trees such as oil palm, coconut, perennial grass, such as ryegrass and fescue, and forage crops, such as alfalfa and clover and from spruce, pine or fir for example, more preferably from Saccharomyces cerevisiae or plants, preferably Brassica napus, Glycine max, Zea mays or Oryza sativa.

[0080] “Homologs” are defined herein as two nucleic acids or proteins that have similar, or “homologous”, nucleotide or amino acid sequences, respectively. Homologs include allelic variants, orthologs, paralogs, agonists and antagonists of SRP as defined hereafter. The term “homolog” further encompasses nucleic acid molecules that differ from one of the nucleotide sequences shown in sequences of SEQ ID NO: (2n+1) for n=0 to 40 and for n=47 to 433 (and portions thereof) due to degeneracy of the genetic code and thus encode the same SRP as that encoded by the amino acid sequences shown in sequences of SEQ ID NO: (2n+2) for n=0 to 40 and for n=47 to 433. As used herein a “naturally occurring” SRP refers to a SRP amino acid sequence that occurs in nature.

[0081] The term “homology” means that the respective nucleic acid molecules or encoded proteins are functionally and/or structurally equivalent. The nucleic acid molecules that are homologous to the nucleic acid molecules described above and that are derivatives of said nucleic acid molecules are, for example, variations of said nucleic acid molecules which represent modifications having the same biological function, in particular encoding proteins with the same or substantially the same biological function. They may be naturally occurring variations, such as sequences from other plant varieties or species, or mutations. These mutations may occur naturally or may be obtained by mutagenesis techniques. The allelic variations may be naturally occurring allelic variants as well as synthetically produced or genetically engineered variants. Structurally equivalents can, for example, be identified by testing the binding of said polypeptide to antibodies or computer based predictions. Structurally equivalent have the similar immunological characteristic, e.g. comprise similar epitopes.

[0082] Functional equivalents derived from one of the polypeptides as shown in SEQ ID NO: (2n+2) for n=0 to 40 and for n=47 to 433 according to the invention by substitution, insertion or deletion have at least 30%, 35%, 40%, 45% or 50%, preferably at least 55%, 60%, 65% or 70% by preference at least 80%, especially preferably at least 85% or 90%, 91%, 92%, 93% or 94%, very especially preferably at least 95%, 97%, 98% or 99% homology with one of the polypeptides as shown in SEQ ID NO: (2n+2) for n=0 to 40 and for n=47 to 433 according to the invention and are distinguished by essentially the same properties as the polypeptide as shown in SEQ ID NO: (2n+2) for n=0 to 40 and for n=47 to 433.

[0083] Functional equivalents derived from the nucleic acid sequence according to SEQ ID NO: (2n+1) for n=0 to 40 and for n=47 to 433 according to the invention by substitution, insertion or deletion have at least 30%, 35%, 40%, 45% or 50%, preferably at least 55%, 60%, 65% or 70% by preference at least 80%, especially preferably at least 85% or 90%, 91%, 92%, 93% or 94%, very especially preferably at least 95%, 97%, 98% or 99% homology with one of the polypeptides as shown in SEQ ID NO: (2n+2) for n=0 to 40 and for n=47 to 433 according to the invention and encode polypeptides having essentially the same properties as the polypeptide as shown in SEQ ID NO: (2n+2) for n=0 to 40 and for n=47 to 433.

[0084] “Essentially the same properties” of a functional equivalent is above all understood as meaning that the functional equivalent has above mentioned activity, e.g. conferring an increase in the fine chemical amount while increasing the amount of protein, activity or function of said functional equivalent in an organism, e.g. a microorgansim, a plant or plant or animal tissue, plant or animal cells or a part of the same.

[0085] By “hybridizing” it is meant that such nucleic acid molecules hybridize under conventional hybridization conditions, preferably under stringent conditions such as described by, e.g., Sambrook (Molecular Cloning; A Laboratory Manual, 2nd Edition, Cold Spring Harbor Laboratory Press, Cold Spring Harbor, N.Y. (1989)) or in Current Protocols in Molecular Biology, John Wiley & Sons, N.Y. (1989), 6.3.1-6.3.6.

[0086] According to the invention, DNA as well as RNA molecules of the nucleic acid of the invention can be used as probes. Further, as template for the identification of functional homologues Northern blot assays as well as Southern blot assays can be performed. The Northern blot assay advantageously provides further information about the expressed gene product: e.g. expression pattern, occurrence of processing steps, like splicing and capping, etc. The Southern blot assay provides additional information about the chromosomal localization and organization of the gene encoding the nucleic acid molecule of the invention.

[0087] A preferred, nonlimiting example of stringent hydridization conditions are hybridizations in 6× sodium chloride/sodium citrate (=SSC) at approximately 45° C., followed by one or more wash steps in 0.2×SSC, 0.1% SDS at 50 to 65° C., for example at 50° C., 55° C. or 60° C. The skilled worker knows that these hybridization conditions differ as a function of the type of the nucleic acid and, for example when organic solvents are present, with regard to the temperature and concentration of the buffer. The temperature under “standard hybridization conditions” differs for example as a function of the type of the nucleic acid between 42° C. and 58° C., preferably between 45° C. and 50° C. in an aqueous buffer with a concentration of 0.1×0.5×, 1×, 2×, 3×, 4× or 5×SSC (pH 7.2). If organic solvent(s) is/are present in the abovementioned buffer, for example 50% formamide, the temperature under standard conditions is approximately 40° C., 42° C. or 45° C. The hybridization conditions for DNA:DNA hybrids are preferably for example 0.1×SSC and 20° C., 25° C., 30° C., 35° C., 40° C. or 45° C., preferably between 30° C. and 45° C. The hybridization conditions for DNA:RNA hybrids are preferably for example 0.1×SSC and 30° C., 35° C., 40° C., 45° C., 50° C. or 55° C., preferably between 45° C. and 55° C. The abovementioned hybridization temperatures are determined for example for a nucleic acid approximately 100 bp (=base pairs) in length and a G+C content of 50% in the absence of formamide. The skilled worker knows to determine the hybridization conditions required with the aid of textbooks, for example the ones mentioned above, or from the following textbooks: Sambrook et al., “Molecular Cloning”, Cold Spring Harbor Laboratory, 1989; Hames and Higgins (Ed.) 1985, “Nucleic Acids Hybridization: A Practical Approach”, IRL Press at Oxford University Press, Oxford; Brown (Ed.) 1991, “Essential Molecular Biology: A Practical Approach”, IRL Press at Oxford University Press, Oxford.

[0088] A further example of one such stringent hybridization condition is hybridization at 4×SSC at 65° C., followed by a washing in 0.1×SSC at 65° C. for one hour. Alternatively, an exemplary stringent hybridization condition is in 50% formamide, 4×SSC at 42° C. Further, the conditions during the wash step can be selected from the range of conditions delimited by low-stringency conditions (approximately 2×SSC at 50° C.) and high-stringency conditions (approximately 0.2×SSC at 50° C., preferably at 65° C.) (20×SSC: 0.3M sodium citrate, 3M NaCl, pH 7.0). In addition, the temperature during the wash step can be raised from low-stringency conditions at room temperature, approximately 22° C., to higher-stringency conditions at approximately 65° C. Both of the parameters salt concentration and temperature can be varied simultaneously, or else one of the two parameters can be kept constant while only the other is varied. Denaturants, for example formamide or SDS, may also be employed during the hybridization. In the presence of 50% formamide, hybridization is preferably effected at 42° C. Relevant factors like i) length of treatment, ii) salt conditions, iii) detergent conditions, iv) competitor DNAs, v) temperature and vi) probe selection can be combined case by case so that not all possibilities can be mentioned herein.

[0089] Thus, in a preferred embodiment, Northern blots are prehybridized with Rothi-Hybri-Quick buffer (Roth, Karlsruhe) at 68° C. for 2 h. Hybridzation with radioactive labelled probe is done overnight at 68° C. Subsequent washing steps are performed at 68° C. with 1×SSC.

[0090] For Southern blot assays the membrane is prehybridized with Rothi-Hybri-Quick buffer (Roth, Karlsruhe) at 68° C. for 2 h. The hybridzation with radioactive labelled probe is conducted over night at 68° C. Subsequently the hybridization buffer is discarded and the filter shortly washed using 2×SSC; 0.1% SDS. After discarding the washing buffer new 2×SSC; 0.1% SDS buffer is added and incubated at 68° C. for 15 minutes. This washing step is performed twice followed by an additional washing step using 1×SSC; 0.1% SDS at 68° C. for 10 min.

[0091] Some further examples of conditions for DNA hybridization (Southern blot assays) and wash step are shown hereinbelow:
[0092] (1) Hybridization conditions can be selected, for example, from the following conditions:
   [0093] a) 4×SSC at 65° C.,
   [0094] b) 6×SSC at 45° C.,
   [0095] c) 6×SSC, 100 mg/ml denatured fragmented fish sperm DNA at 68° C.,
   [0096] d) 6×SSC, 0.5% SDS, 100 mg/ml denatured salmon sperm DNA at 68° C.,
   [0097] e) 6×SSC, 0.5% SDS, 100 mg/ml denatured fragmented salmon sperm DNA, 50% formamide at 42° C.,
   [0098] f) 50% formamide, 4×SSC at 42° C.,
   [0099] g) 50% (vol/vol) formamide, 0.1% bovine serum albumin, 0.1% Ficoll, 0.1% polyvinylpyrrolidone, 50 mM sodium phosphate buffer pH 6.5, 750 mM NaCl, 75 mM sodium citrate at 42° C.,
   [0100] h) 2× or 4×SSC at 50° C. (low-stringency condition), or
   [0101] i) 30 to 40% formamide, 2× or 4×SSC at 42° C. (low-stringency condition).
[0102] (2) Wash steps can be selected, for example, from the following conditions:
   [0103] a) 0.015 M NaCl/0.0015 M sodium citrate/0.1% SDS at 50° C.
   [0104] b) 0.1×SSC at 65° C.
   [0105] c) 0.1×SSC, 0.5% SDS at 68° C.
   [0106] d) 0.1×SSC, 0.5% SDS, 50% formamide at 42° C.
   [0107] e) 0.2×SSC, 0.1% SDS at 42° C.
   [0108] f) 2×SSC at 65° C. (low-stringency condition).

[0109] With regard to the invention described here, “transformed” means all those plants or parts thereof which have been brought about and/or modified by manipulation methods and in which either
[0110] a) one or more genes, preferably encoded by one or more nucleic acid sequence as depicted in sequences of SEQ ID NO: (2n+1) for n=0 to 40 and for n=47 to 433 or a homolog thereof, or
[0111] b) a genetic regulatory element or elements, for example promoters, which are functionally linked e.g. to a nucleic acid sequence of sequences of SEQ ID NO: (2n+1) for n=0 to 40 and for n=47 to 433 or a homolog thereof, or
[0112] c) (a) and (b)
   is/are not present in its/their natural genetic environment and/or has/have been modified by means of manipulation methods.

[0113] It is possible for the modification to be, by way of example, a substitution, addition, deletion, inversion or insertion of one or more nucleotides. Manipulation in the present invention is also meant to encompass all changes in the plant cell, including induced or non-induced (spontaneous) mutagenesis, directed or non-directed genetic manipulation by conventional breeding or by modern genetic manipulation methods, e.g. reduction of gene expression by double-stranded RNA interference (dsRNAi), introduction of an antisense nucleic acid, a ribozyme, an antisense nucleic acid combined with a ribozyme, a nucleic acid encoding a co-suppressor, a nucleic acid encoding a dominant negative protein, DNA- or RNA- or protein-binding factors targeting said gene or -RNA or -proteins, RNA degradation inducing viral nucleic acids and expression systems, systems for inducing a homolog recombination of said genes, mutations in said genes or a combination of the above. Additional modifications and manipulation methods will become apparent from the further description.

[0114] “Natural genetic environment” means the natural chromosomal locus in the organism of origin or the presence in a genomic library. In the case of a genomic library, the natural, genetic environment of the nucleic acid sequence is preferably at least partially still preserved. The environment flanks the nucleic acid sequence at least on one side and has a sequence length of at least 50 bp, preferably at least 500 bp, particularly preferably at least 1000 bp, very particularly preferably at least 5000 bp.

[0115] A plant or plant cell is considered “true breeding” for a particular attribute if it is genetically homozygous for that attribute to the extent that, when the true-breeding plant is self-pollinated, a significant amount of independent segregation of the attribute among the progeny is not observed.

[0116] As also used herein, the terms “nucleic acid” and “nucleic acid molecule” are intended to include DNA molecules (e.g., cDNA or genomic DNA) and RNA molecules (e.g., mRNA) and analogs of the DNA or RNA generated using nucleotide analogs. This term also encompasses untranslated sequence located at both the 3′ and 5′ ends of the coding region of the gene: at least about 1000 nucleotides of sequence upstream from the 5′ end of the coding region and at least about 200 nucleotides of sequence downstream from the 3′ end of the coding region of the gene. The nucleic acid molecule can be single-stranded or double-stranded, but preferably is double-stranded DNA.

[0117] An “isolated” nucleic acid molecule is one that is substantially separated from other nucleic acid molecules, which are present in the natural source of the nucleic acid. That means other nucleic acid molecules are present in an amount less than 5% based on weight of the amount of the desired nucleic acid, preferably less than 2% by weight, more preferably less than 1% by weight, most preferably less than 0.5% by weight. Preferably, an “isolated” nucleic acid is free of some of the sequences that naturally flank the nucleic acid (i.e., sequences located at the 5′ and 3′ ends of the nucleic acid) in the genomic DNA of the organism from which the nucleic acid is derived. For example, in various embodiments, the isolated gene encoding nucleic acid molecule can contain less than about 5 kb, 4 kb, 3 kb, 2 kb, 1 kb, 0.5 kb or 0.1 kb of nucleotide sequences which naturally flank the nucleic acid molecule in genomic DNA of the cell from which the nucleic acid is derived. Moreover, an “isolated” nucleic acid molecule, such as a cDNA molecule, can be free from some of the other cellular material with which it is naturally associated, or culture medium when produced by recombinant techniques, or chemical precursors or other chemicals when chemically synthesized.

[0118] A nucleic acid molecule of the present invention, e.g., a nucleic acid molecule encoding a gene or a portion thereof or a homolog thereof which confers tolerance and/or resistance to environmental stress in plants, when inactivated or down-regulated, can be isolated using standard molecular biology techniques and the sequence information provided herein. For example, an Arabidopsis thaliana gene encoding cDNA can be isolated from an A. thaliana library using all or portion of one of sequences of the nucleic acid according to SEQ ID NO: (2n+1) for n=0 to 40 and for n=47 to 433. Moreover, a nucleic acid molecule encompassing all or a portion of one of the sequences of sequences of SEQ ID NO: (2n+1) for n=0 to 40 and for n=47 to 433 can be isolated by the polymerase chain reaction using oligonucleotide primers designed based upon this sequence. For example, mRNA can be isolated from plant cells (e.g., by the guanidinium-thiocyanate extraction procedure of Chirgwin et al., 1979 Biochemistry 18:5294-5299) and cDNA can be prepared using reverse transcriptase (e.g., Moloney MLV reverse transcriptase, available from Gibco/BRL, Bethesda, Md.; or AMV reverse transcriptase, available from Seikagaku America, Inc., St. Petersburg, Fla.). Synthetic oligonucleotide primers for polymerase chain reaction amplification can be designed based upon one of the nucleotide sequences according to SEQ ID NO: (2n+1) for n=0 to 40 and for n=47 to 433. A nucleic acid molecule of the invention can be amplified using cDNA or, alternatively, genomic DNA, as a template and appropriate oligonucleotide primers according to standard PCR amplification techniques. The nucleic acid molecule so amplified can be cloned into an appropriate vector and characterized by DNA sequence analysis. Furthermore, oligonucleotides corresponding to a gene encoding nucleotide sequence can be prepared by standard synthetic techniques, e.g., using an automated DNA synthesizer.

[0119] In a preferred embodiment, an isolated nucleic acid molecule of the invention comprises one of the nucleotide sequences shown in sequences of SEQ ID NO: (2n+1) for n=0 to 40 and for n=47 to 433 or homologs thereof encoding a gene (i.e., the “coding region”), as well as 5′ untranslated sequences and 3′ untranslated sequences.

[0120] Moreover, the nucleic acid molecule of the invention can comprise only a portion of the coding region of one of sequences of SEQ ID NO: (2n+1) for n=0 to 40 and for n=47 to 433 or homologs thereof, for example, a fragment which can be used as a probe or primer or a fragment encoding a biologically active portion of a gene. Portions of genes or proteins encoded by said gene encoding nucleic acid molecules of the invention are preferably biologically active portions of genes or proteins described herein. As used herein, the term “biologically active portion of” a gene or protein encoded by said gene is intended to include a portion, e.g., a domain/motif, of the gene or protein that participates in stress tolerance and/or resistance response in a plant, which is preferably achieved by altering metabolic activity, and finally resulting in increased tolerance and/or resistance to environmental stress. To determine whether inactivation or down-regulation of a gene or protein encoded by said gene, or a biologically active portion thereof, results in increased stress tolerance in a plant, which is preferably achieved by altering metabolic activity, a stress analysis of a plant comprising the protein may be performed for example by the above screening method or by estimating the general appearance and health. More specifically, nucleic acid fragments encoding biologically active portions of a gene or protein encoded by said gene can be prepared by isolating a portion of one of sequences of the nucleic acid according to SEQ ID NO: (2n+1) for n=0 to 40 and for n=47 to 433 or homologs thereof expressing the encoded portion of the gene, protein or peptide (e.g., by recombinant expression in vitro) and assessing the activity of the encoded portion of the gene, protein or peptide.

[0121] Moreover, it is possible to identify conserved regions from various organisms by carrying out protein sequence alignments with the polypeptide used in the process of the invention, in particular with sequences of the polypeptide of the invention, from which conserved regions, and in turn, degenerate primers can be derived. Conserved region for the polypeptide of the invention are indicated in the alignments shown in the figures. Conserved regions are those, which show a very little variation in the amino acid in one particular position of several homologs from different origin.

[0122] Typically portions of a protein encompassed by the present invention include peptides comprising amino acid sequences derived from the amino acid sequence of the protein encoded by one of sequences of SEQ ID NO: (2n+2) for n=0 to 40 and for n=47 to 433, or the amino acid sequence of a protein homologous to the protein, which include fewer amino acids than the full length protein or a full length protein which is homologous to the protein, and exhibits at least some activity of the protein. Preferred portions according to the present invention (e.g., peptides or proteins which are, for example, 5, 10, 15, 20, 30, 35, 36, 37, 38, 39, 40, 50, 100 or more amino acids in length) comprise a domain or motif with at least some activity of the protein. Moreover, other biologically active portions in which other regions of the protein are deleted can be prepared by recombinant techniques and evaluated for one or more of the activities described herein. Preferably, the biologically active portions of the protein include one or more selected domains/motifs or portions thereof having biological activity.

[0123] In addition to fragments of the protein described herein, the present invention especially includes homologs and analogs of naturally occurring proteins and protein encoding nucleic acids in a plant.

[0124] “Homologs” are defined herein as two nucleic acids or proteins that have similar, or “homologous”, nucleotide or amino acid sequences, respectively. Homologs include allelic variants, orthologs, paralogs, agonists and antagonists of the protein as defined hereafter. The term “homolog” further encompasses nucleic acid molecules that differ from one of the nucleotide sequences shown in sequences of SEQ ID NO: (2n+1) for n=0 to 40 and for n=47 to 433 (and portions thereof) due to degeneracy of the genetic code and thus encode the same protein as that encoded by the amino acid sequences. As used herein a “naturally occurring” refers to an amino acid sequence that occurs in nature.

[0125] In addition to fragments and fusion polypeptides of the invention described herein, the present invention includes homologs and analogs of naturally occurring proteins and protein encoding nucleic acids of the invention in a plant. “Homologs” are defined herein as two nucleic acids or polypeptides that have similar, or substantially identical, nucleotide or amino acid sequences, respectively. Homologs include allelic variants, orthologs, paralogs, agonists and antagonists of SRPs as defined hereafter. The term “homolog” further encompasses nucleic acid molecules that differ from one of the nucleotide sequences shown in SEQ ID NO: (2n+1) for n=0 to 40 and for n=47 to 433 (and portions thereof) due to degeneracy of the genetic code and thus encode the same SRP as that encoded by the nucleotide sequences shown in SEQ ID NO: (2n+1) for n=0 to 40 and for n=47 to 433. As used herein a “naturally occurring” protein refers to amino acid sequence that occurs in nature. Preferably, a naturally occurring protein whose reduction or deletion results in increased tolerance and/or resistance to an environmental stress comprises an amino acid sequence selected from the group consisting of ones shown in SEQ ID NO: (2n+2) for n=0 to 40 and for n=47 to 433.

[0126] An agonist of the protein whose reduction or deletion results in increased tolerance and/or resistance to an environmental stress can retain substantially the same, or a subset, of the biological activities of the said protein. An antagonist of the said protein can inhibit one or more of the activities of the naturally occurring form of the protein whose reduction or deletion results in increased tolerance and/or resistance to an environmental stress. For example, an antagonist can competitively bind to a downstream or upstream member of the cell membrane component metabolic cascade that includes said protein, or bind to the protein of the invention that mediates transport of compounds across such membranes, thereby preventing translocation from taking place.

[0127] Nucleic acid molecules corresponding to natural allelic variants and analogs, orthologs and paralogs of a protein of the invention cDNA can be isolated based on their identity to the Arabidopsis thaliana, Saccharomyces cerevisiae, E. coli, preferably Brassica napus, Glycine max, Zea mays or Oryza sativa protein nucleic acids described herein using said proteins cDNAs, or a portion thereof, as a hybridization probe according to standard hybridization techniques under stringent hybridization conditions. In an alternative embodiment, homologs of the protein whose reduction or deletion results in increased tolerance and/or resistance to an environmental stress can be identified by screening combinatorial libraries of mutants, e.g., truncation mutants, of said protein for their agonist or antagonist activity. In one embodiment, a variegated library of protein whose reduction or deletion results in increased tolerance and/or resistance to an environmental stress variants is generated by combinatorial mutagenesis at the nucleic acid level and is encoded by a variegated gene library. A variegated library of SRP variants can be produced by, for example, enzymatically ligating a mixture of synthetic oligonucleotides into gene sequences such that a degenerate set of potential SRP sequences is expressible as individual polypeptides, or alternatively, as a set of larger fusion polypeptides (e.g., for phage display) containing the set of protein whose reduction or deletion results in increased tolerance and/or resistance to an environmental stress sequences therein. There are a variety of methods that can be used to produce libraries of potential protein homologs from a degenerate oligonucleotide sequence. Chemical synthesis of a degenerate gene sequence can be performed in an automatic DNA synthesizer, and the synthetic gene is then ligated into an appropriate expression vector. Use of a degenerate set of genes allows for the provision, in one mixture, of all of the sequences encoding the desired set of potential protein of the invention sequences. Methods for synthesizing degenerate oligonucleotides are known in the art. See, e.g., Narang, S. A., 1983, Tetrahedron 39:3; Itakura et al., 1984, Annu. Rev. Biochem. 53:323; Itakura et al., 1984, Science 198:1056; Ike et al., 1983, Nucleic Acid Res. 11:477.

[0128] In addition, libraries of fragments of the protein of the invention coding regions can be used to generate a variegated population of protein fragments for screening and subsequent selection of homologs of a said proteins. In one embodiment, a library of coding sequence fragments can be generated by treating a double stranded PCR fragment of a protein of the invention coding sequence with a nuclease under conditions wherein nicking occurs only about once per molecule, denaturing the double stranded DNA, renaturing the DNA to form double stranded DNA, which can include sense/antisense pairs from different nicked products, removing single stranded portions from reformed duplexes by treatment with S1 nuclease, and ligating the resulting fragment library into an expression vector. By this method, an expression library can be derived which encodes N-terminal, C-terminal, and internal fragments of various sizes of the protein whose reduction or deletion results in increased tolerance and/or resistance to an environmental stress.

[0129] Several techniques are known in the art for screening gene products of combinatorial libraries made by point mutations or truncation, and for screening cDNA libraries for gene products having a selected property. Such techniques are adaptable for rapid screening of the gene libraries generated by the combinatorial mutagenesis of SRP homologs. The most widely used techniques, which are amenable to high through-put analysis, for screening large gene libraries typically include cloning the gene library into replicable expression vectors, transforming appropriate cells with the resulting library of vectors, and expressing the combinatorial genes under conditions in which detection of a desired activity facilitates isolation of the vector encoding the gene whose product was detected. Recursive ensemble mutagenesis (REM), a new technique that enhances the frequency of functional mutants in the libraries, can be used in combination with the screening assays to identify SRP homologs (Arkin and Yourvan, 1992, PNAS 89:7811-7815; Delgrave et al., 1993, Polypeptide Engineering 6(3):327-331). In another embodiment, cell based assays can be exploited to analyze a variegated protein (of the invention) library, using methods well known in the art. The present invention further provides a method of identifying a novel protein whose reduction or deletion results in increased tolerance and/or resistance to an environmental stress, comprising (a) raising a specific antibody response to said protein, or a fragment thereof, as described herein; (b) screening putative SRP material with the antibody, wherein specific binding of the antibody to the material indicates the presence of a potentially novel protein whose reduction or deletion results in increased tolerance and/or resistance to an environmental stress; and (c) analyzing the bound material in comparison to known proteins, to determine its novelty.

[0130] As stated above, the present invention includes protein whose reduction or deletion results in increased tolerance and/or resistance to an environmental stress and homologs thereof. To determine the percent sequence identity of two amino acid sequences (e.g., one of the sequences of SEQ ID NO: (2n+2) for n=0 to 40 and for n=47 to 433, and a mutant form thereof), the sequences are aligned for optimal comparison purposes (e.g., gaps can be introduced in the sequence of one polypeptide for optimal alignment with the other polypeptide or nucleic acid). The amino acid residues at corresponding amino acid positions are then compared. When a position in one sequence (e.g., one of the sequences of SEQ ID NO: (2n+2) for n=0 to 40 and for n=47 to 433) is occupied by the same amino acid residue as the corresponding position in the other sequence (e.g., a mutant form of the sequence selected from the polypeptide of SEQ ID NO: (2n+2) for n=0 to 40 and for n=47 to 433), then the molecules are identical at that position. The same type of comparison can be made between two nucleic acid sequences.

[0131] The percent sequence identity between the two sequences is a function of the number of identical positions shared by the sequences (i.e., percent sequence identity=numbers of identical positions/total numbers of positions×100). Preferably, the isolated amino acid homologs included in the present invention are at least about 50-60%, preferably at least about 60-70%, and more preferably at least about 70-75%, 75-80%, 80-85%, 85-90% or 90-95%, and most preferably at least about 96%, 97%, 98%, 99% or more identical to an entire amino acid sequence shown in SEQ ID NO: (2n+2) for n=0 to 40 and for n=47 to 433. In yet another embodiment, the isolated amino acid homologs included in the present invention are at least about 50-60%, preferably at least about 60-70%, and more preferably at least about 70-75%, 75-80%, 80-85%, 85-90% or 90-95%, and most preferably at least about 96%, 97%, 98%, 99% or more identical to an entire amino acid sequence encoded by a nucleic acid sequence according to SEQ ID NO: (2n+1) for n=0 to 40 and for n=47 to 433. In other embodiments, the amino acid homologs of the proteins of the invention have sequence identity over at least 15 contiguous amino acid residues, more preferably at least 25 contiguous amino acid residues, and most preferably at least 35 contiguous amino acid residues of a polypeptide of SEQ ID NO: (2n+2) for n=0 to 40 and for n=47 to 433.

[0132] In another preferred embodiment, an isolated nucleic acid homolog of the invention comprises a nucleotide sequence which is at least about 50-60%, preferably at least about 60-70%, more preferably at least about 70-75%, 75-80%, 80-85%, 85-90% or 90-95%, and even more preferably at least about 95%, 96%, 97%, 98%, 99% or more identical to a nucleotide sequence according to SEQ ID NO: (2n+1) for n=0 to 40 and for n=47 to 433, or to a portion comprising at least 20, 30, 40, 50, 60 consecutive nucleotides thereof. The preferable length of sequence comparison for nucleic acids is at least 75 nucleotides, more preferably at least 100 nucleotides and most preferably the entire length of the coding region.

[0133] It is further preferred that the isolated nucleic acid homolog of the invention encodes a SRP, or portion thereof, that is at least 85% identical to an amino acid sequence of SEQ ID NO: (2n+2) for n=0 to 40 and for n=47 to 433 and that functions as a modulator of an environmental stress response in a plant. In a more preferred embodiment, overexpression of the nucleic acid homolog in a plant increases the tolerance of the plant to an environmental stress.

[0134] For the purposes of the invention, the percent sequence identity between two nucleic acid or polypeptide sequences may be determined using the Vector NTI 6.0 (PC) software package (InforMax, 7600 Wisconsin Ave., Bethesda, Md. 20814). A gap opening penalty of 15 and a gap extension penalty of 6.66 are used for determining the percent identity of two nucleic acids. A gap opening penalty of 10 and a gap extension penalty of 0.1 are used for determining the percent identity of two polypeptides. All other parameters are set at the default settings. For purposes of a multiple alignment (Clustal W algorithm), the gap opening penalty is 10, and the gap extension penalty is 0.05 with blosum62 matrix. It is to be understood that for the purposes of determining sequence identity when comparing a DNA sequence to an RNA sequence, a thymidine nucleotide is equivalent to a uracil nucleotide.

[0135] In another aspect, the invention provides an isolated nucleic acid comprising a polynucleotide that hybridizes to the polynucleotide of SEQ ID NO: (2n+1) for n=0 to 40 and for n=47 to 433 under stringent conditions. More particularly, an isolated nucleic acid molecule of the invention is at least 15 nucleotides in length and hybridizes under stringent conditions to the nucleic acid molecule comprising a nucleotide sequence of SEQ ID NO: (2n+1) for n=0 to 40 and for n=47 to 433. In other embodiments, the nucleic acid is at least 30, 50, 100, 250 or more nucleotides in length. Preferably, an isolated nucleic acid homolog of the invention comprises a nucleotide sequence which hybridizes under highly stringent conditions to the nucleotide sequence shown in SEQ ID NO: (2n+1) for n=0 to 40 and for n=47 to 433, and functions as a modulator of stress tolerance in a plant. In a further preferred embodiment, overexpression of the isolated nucleic acid homolog in a plant increases a plant's tolerance to an environmental stress.

[0136] As used herein with regard to hybridization for DNA to DNA blot, the term “stringent conditions” refers in one embodiment to hybridization overnight at 60° C. in 10×Denharts solution, 6×SSC, 0.5% SDS and 100 μg/ml denatured salmon sperm DNA. Blots are washed sequentially at 62° C. for 30 minutes each time in 3×SSC/0.1% SDS, followed by 1×SSC/0.1% SDS and finally 0.1×SSC/0.1% SDS. As also used herein, “highly stringent conditions” refers to hybridization overnight at 65° C. in 10×Denharts solution, 6×SSC, 0.5% SDS and 100 μg/ml denatured salmon sperm DNA. Blots are washed sequentially at 65° C. for 30 minutes each time in 3×SSC/0.1% SDS, followed by 1×SSC/0.1% SDS and finally 0.1×SSC/0.1% SDS. Methods for nucleic acid hybridizations are described in Meinkoth and Wahl, 1984, Anal. Biochem. 138:267-284; Ausubel et al. eds, 1995, Current Protocols in Molecular Biology, Chapter 2, Greene Publishing and Wiley-Interscience, New York; and Tijssen, 1993, Laboratory Techniques in Biochemistry and Molecular Biology: Hybridization with Nucleic Acid Probes, Part I, Chapter 2, Elsevier, N.Y. Preferably, an isolated nucleic acid molecule of the invention that hybridizes under stringent or highly stringent conditions to a sequence of SEQ ID NO: (2n+1) for n=0 to 40 and for n=47 to 433 corresponds to a naturally occurring nucleic acid molecule. As used herein, a “naturally occurring” nucleic acid molecule refers to an RNA or DNA molecule having a nucleotide sequence that occurs in nature (e.g., encodes a natural polypeptide). In one embodiment, the nucleic acid encodes a naturally occurring Arabidopsis thaliana, Brassica napus, Glycine max, Zea mays or Oryza sativa protein whose reduction or deletion results in increased tolerance and/or resistance to an environmental stress.

[0137] Using the above-described methods, and others known to those of skill in the art, one of ordinary skill in the art can isolate homologs of the protein whose reduction or deletion results in increased tolerance and/or resistance to an environmental stress comprising amino acid sequences shown in SEQ ID NO: (2n+1) for n=0 to 40 and for n=47 to 433. One subset of these homologs are allelic variants. As used herein, the term “allelic variant” refers to a nucleotide sequence containing polymorphisms that lead to changes in the amino acid sequences of said protein and that exist within a natural population (e.g., a plant species or variety). Such natural allelic variations can typically result in 1-5% variance in a nucleic acid of the invention. Allelic variants can be identified by sequencing the nucleic acid sequence of interest in a number of different plants, which can be readily carried out by using hybridization probes to identify the same SRP genetic locus in those plants. Any and all such nucleic acid variations and resulting amino acid polymorphisms or variations in a protein whose reduction or deletion results in increased tolerance and/or resistance to an environmental stress that are the result of natural allelic variation and that do not alter the functional activity of said protein, are intended to be within the scope of the invention.

[0138] An isolated nucleic acid molecule encoding a protein whose reduction or deletion results in increased tolerance and/or resistance to an environmental stress having sequence identity with a polypeptide sequence according to SEQ ID NO: (2n+2) for n=0 to 40 and for n=47 to 433 can be created by introducing one or more nucleotide substitutions, additions or deletions into a nucleotide sequence of SEQ ID NO: (2n+1) for n=0 to 40 and for n=47 to 433, respectively, such that one or more amino acid substitutions, additions, or deletions are introduced into the encoded polypeptide. Mutations can be introduced into one of the sequences of SEQ ID NO: (2n+1) for n=0 to 40 and for n=47 to 433 by standard techniques, such as site-directed mutagenesis and PCR-mediated mutagenesis. Preferably, conservative amino acid substitutions are made at one or more predicted non-essential amino acid residues. A “conservative amino acid substitution” is one in which the amino acid residue is replaced with an amino acid residue having a similar side chain.

[0139] To knock the mutation is carried out preferably at essential positions.

[0140] Families of amino acid residues having similar side chains have been defined in the art. These families include amino acids with basic side chains (e.g., lysine, arginine, histidine), acidic side chains (e.g., aspartic acid, glutamic acid), uncharged polar side chains (e.g., glycine, asparagine, glutamine, serine, threonine, tyrosine, cysteine), nonpolar side chains (e.g., alanine, valine, leucine, isoleucine, proline, phenylalanine, methionine, tryptophan), beta-branched side chains (e.g., threonine, valine, isoleucine) and aromatic side chains (e.g., tyrosine, phenylalanine, tryptophan, histidine). Thus, a predicted nonessential amino acid residue in a protein of the invention is preferably replaced with another amino acid residue from the same side chain family. Alternatively, in another embodiment, mutations can be introduced randomly along all or part of a protein of the invention coding sequence, such as by saturation mutagenesis, and the resultant mutants can be screened for a SRP activity described herein to identify mutants that retain protein activity. Following mutagenesis of one of the sequences of SEQ ID NO: (2n+1) for n=0 to 40 and for n=47 to 433, the encoded polypeptide can be expressed recombinantly and the activity of the polypeptide can be determined by analyzing the stress tolerance of a plant expressing the polypeptide as described herein.

[0141] In addition to the nucleic acid molecules encoding the protein whose reduction or deletion results in increased tolerance and/or resistance to an environmental stress described above, another aspect of the invention pertains to isolated nucleic acid molecules that are antisense thereto. Antisense polynucleotides are thought to inhibit gene expression of a target polynucleotide by specifically binding the target polynucleotide and interfering with transcription, splicing, transport, translation, and/or stability of the target polynucleotide. Methods are described in the prior art for targeting the antisense polynucleotide to the chromosomal DNA, to a primary RNA transcript, or to a processed mRNA. Preferably, the target regions include splice sites, translation initiation codons, translation termination codons, and other sequences within the open reading frame.

[0142] The term “antisense,” for the purposes of the invention, refers to a nucleic acid comprising a polynucleotide that is sufficiently complementary to all or a portion of a gene, primary transcript, or processed mRNA, so as to interfere with expression of the endogenous gene. “Complementary” polynucleotides are those that are capable of base pairing according to the standard Watson-Crick complementarity rules. specifically, purines will base pair with pyrimidines to form a combination of guanine paired with cytosine (G:C) and adenine paired with either thymine (A:T) in the case of DNA, or adenine paired with uracil (A:U) in the case of RNA. It is understood that two polynucleotides may hybridize to each other even if they are not completely complementary to each other, provided that each has at least one region that is substantially complementary to the other. The term “antisense nucleic acid” includes single stranded RNA as well as double-stranded DNA expression cassettes that can be transcribed to produce an antisense RNA. “Active” antisense nucleic acids are antisense RNA molecules that are capable of selectively hybridizing with a primary transcript or mRNA encoding a polypeptide having at least 80% sequence identity with the polypeptide of SEQ ID NO: (2n+2) for n=0 to 40 and for n=47 to 433.

[0143] The antisense nucleic acid can be complementary to an entire SRP coding strand, or to only a portion thereof. In one embodiment, an antisense nucleic acid molecule is antisense to a “coding region” of the coding strand of a nucleotide sequence encoding a SRP. The term “coding region” refers to the region of the nucleotide sequence comprising codons that are translated into amino acid residues. In another embodiment, the antisense nucleic acid molecule is antisense to a “noncoding region” of the coding strand of a nucleotide sequence encoding a SRP. The term “noncoding region” refers to 5′ and 3′ sequences that flank the coding region that are not translated into amino acids (i.e., also referred to as 5′ and 3′ untranslated regions). The antisense nucleic acid molecule can be complementary to the entire coding region of SRP mRNA, but more preferably is an oligonucleotide which is antisense to only a portion of the coding or noncoding region of SRP mRNA. For example, the antisense oligonucleotide can be complementary to the region surrounding the translation start site of PKSRP mRNA. An antisense oligonucleotide can be, for example, about 5, 10, 15, 20, 25, 30, 35, 40, 45 or 50 nucleotides in length. Typically, the antisense molecules of the present invention comprise an RNA having 60-100% sequence identity with at least 14 consecutive nucleotides of SEQ ID NO: (2n+1) for n=0 to 40 and for n=47 to 433. Preferably, the sequence identity will be at least 70%, more preferably at least 75%, 80%, 85%, 90%, 95%, 98% and most preferably 99%.

[0144] An antisense nucleic acid of the invention can be constructed using chemical synthesis and enzymatic ligation reactions using procedures known in the art. For example, an antisense nucleic acid (e.g., an antisense oligonucleotide) can be chemically synthesized using naturally occurring nucleotides or variously modified nucleotides designed to increase the biological stability of the molecules or to increase the physical stability of the duplex formed between the antisense and sense nucleic acids, e.g., phosphorothioate derivatives and acridine substituted nucleotides can be used. Examples of modified nucleotides which can be used to generate the antisense nucleic acid include 5-fluorouracil, 5-bromouracil, 5-chlorouracil, 5-iodouracil, hypoxanthine, xanthine, 4-acetylcytosine, 5-(carboxyhydroxylmethyl) uracil, 5-carboxymethylaminomethyl-2-thiouridine, 5-carboxymethylaminomethyluracil, dihydrouracil, beta-D-galactosylqueosine, inosine, N6-isopentenyladenine, 1-methylguanine, 1-methylinosine, 2,2-dimethylguanine, 2-methyladenine, 2-methylguanine, 3-methylcytosine, 5-methylcytosine, N6-adenine, 7-methylguanine, 5-methylaminomethyluracil, 5-methoxyaminomethyl-2-thiouracil, beta-D-mannosylqueosine, 5′-methoxycarboxymethyluracil, 5-methoxyuracil, 2-methylthio-N6-isopentenyladenine, uracil-5-oxyacetic acid (v), wybutoxosine, pseudouracil, queosine, 2-thiocytosine, 5-methyl-2-thiouracil, 2-thiouracil, 4-thiouracil, 5-methyluracil, uracil-5-oxyacetic acid methylester, uracil-5-oxyacetic acid (v), 5-methyl-2-thiouracil, 3-(3-amino-3-N-2-carboxypropyl) uracil, (acp3)w, and 2,6-diaminopurine. Alternatively, the antisense nucleic acid can be produced biologically using an expression vector into which a nucleic acid has been subcloned in an antisense orientation (i.e., RNA transcribed from the inserted nucleic acid will be of an antisense orientation to a target nucleic acid of interest, described further in the following subsection).

[0145] In yet another embodiment, the antisense nucleic acid molecule of the invention is an α-anomeric nucleic acid molecule. An α-anomeric nucleic acid molecule forms specific double-stranded hybrids with complementary RNA in which, contrary to the usual β-units, the strands run parallel to each other (Gaultier et al., 1987, Nucleic Acids. Res. 15:6625-6641). The antisense nucleic acid molecule can also comprise a 2′-o-methylribonucleotide (Inoue et al., 1987, Nucleic Acids Res. 15:6131-6148) or a chimeric RNA-DNA analogue (Inoue et al., 1987, FEBS Lett. 215:327-330).

[0146] The antisense nucleic acid molecules of the invention are typically administered to a cell or generated in situ such that they hybridize with or bind to cellular mRNA and/or genomic DNA encoding a SRP to thereby inhibit expression of the polypeptide, e.g., by inhibiting transcription and/or translation. The hybridization can be by conventional nucleotide complementarity to form a stable duplex, or, for example, in the case of an antisense nucleic acid molecule which binds to DNA duplexes, through specific interactions in the major groove of the double helix. The antisense molecule can be modified such that it specifically binds to a receptor or an antigen expressed on a selected cell surface, e.g., by linking the antisense nucleic acid molecule to a peptide or an antibody which binds to a cell surface receptor or antigen. The antisense nucleic acid molecule can also be delivered to cells using the vectors described herein. To achieve sufficient intracellular concentrations of the antisense molecules, vector constructs in which the antisense nucleic acid molecule is placed under the control of a strong prokaryotic, viral, or eukaryotic (including plant) promoter are preferred.

[0147] As an alternative to antisense polynucleotides, ribozymes, sense polynucleotides, or double stranded RNA (dsRNA) can be used to reduce expression of a SRP polypeptide. By “ribozyme” is meant a catalytic RNA-based enzyme with ribonuclease activity which is capable of cleaving a single-stranded nucleic acid, such as an mRNA, to which it has a complementary region. Ribozymes (e.g., hammerhead ribozymes described in Haselhoff and Gerlach, 1988, Nature 334:585-591) can be used to catalytically cleave proteins of the invention mRNA transcripts to thereby inhibit translation of SRP mRNA. A ribozyme having specificity for a nucleic acid of the invention can be designed based upon the nucleotide sequence of a cDNA, as disclosed herein (i.e., sequences according to SEQ ID NO: (2n+1) for n=0 to 40 and for n=47 to 433) or on the basis of a heterologous sequence to be isolated according to methods taught in this invention. For example, a derivative of a Tetrahymena L-19 IVS RNA can be constructed in which the nucleotide sequence of the active site is complementary to the nucleotide sequence to be cleaved in a SRP-encoding mRNA. See, e.g., U.S. Pat. Nos. 4,987,071 and 5,116,742 to Cech et al. Alternatively, SRP mRNA can be used to select a catalytic RNA having a specific ribonuclease activity from a pool of RNA molecules. See, e.g., Bartel, D. and Szostak, J. W., 1993, Science 261:1411-1418. In preferred embodiments, the ribozyme will contain a portion having at least 7, 8, 9, 10, 12, 14, 16, 18 or 20 nucleotides, and more preferably 7 or 8 nucleotides, that have 100% complementarity to a portion of the target RNA. Methods for making ribozymes are known to those skilled in the art. See, e.g., U.S. Pat. Nos. 6,025,167; 5,773,260; and 5,496,698.

[0148] The term “dsRNA,” as used herein, refers to RNA hybrids comprising two strands of RNA. The dsRNAs can be linear or circular in structure. In a preferred embodiment, dsRNA is specific for a polynucleotide encoding either the polypeptide of SEQ ID NO: (2n+2) for n=0 to 40 and for n=47 to 433 or a polypeptide having at least 70% sequence identity with SEQ ID NO: (2n+2) for n=0 to 40 and for n=47 to 433. The hybridizing RNAs may be substantially or completely complementary. By “substantially complementary,” is meant that when the two hybridizing RNAs are optimally aligned using the BLAST program as described above, the hybridizing portions are at least 95% complementary. Preferably, the dsRNA will be at least 100 base pairs in length. Typically, the hybridizing RNAs will be of identical length with no over hanging 5′ or 3′ ends and no gaps. However, dsRNAs having 5′ or 3′ overhangs of up to 100 nucleotides may be used in the methods of the invention.

[0149] The dsRNA may comprise ribonucleotides or ribonucleotide analogs, such as 2′-O-methyl ribosyl residues, or combinations thereof. See, e.g., U.S. Pat. Nos. 4,130,641 and 4,024,222. A dsRNA polyriboinosinic acid:polyribocytidylic acid is described in U.S. Pat. No. 4,283,393. Methods for making and using dsRNA are known in the art. One method comprises the simultaneous transcription of two complementary DNA strands, either in vivo, or in a single in vitro reaction mixture. See, e.g., U.S. Pat. No. 5,795,715. In one embodiment, dsRNA can be introduced into a plant or plant cell directly by standard transformation procedures. Alternatively, dsRNA can be expressed in a plant cell by transcribing two complementary RNAs. Other methods for the inhibition of endogenous gene expression, such as triple helix formation (Moser et al., 1987, Science 238:645-650 and Cooney et al., 1988, Science 241:456-459) and cosuppression (Napoli et al., 1990, The Plant Cell 2:279-289) are known in the art. Partial and full-length cDNAs have been used for the cosuppression of endogenous plant genes. See, e.g., U.S. Pat. Nos. 4,801,340, 5,034,323, 5,231,020, and 5,283,184; Van der Kroll et al., 1990, The Plant Cell 2:291-299; Smith et al., 1990, Mol. Gen. Genetics 224:477-481 and Napoli et al., 1990, The Plant Cell 2:279-289.

[0150] For sense suppression, it is believed that introduction of a sense polynucleotide blocks transcription of the corresponding target gene. The sense polynucleotide will have at least 65% sequence identity with the target plant gene or RNA. Preferably, the percent identity is at least 80%, 90%, 95% or more. The introduced sense polynucleotide need not be full length relative to the target gene or transcript. Preferably, the sense polynucleotide will have at least 65% sequence identity with at least 100 consecutive nucleotides of SEQ ID NO: (2n+1) for n=0 to 40 and for n=47 to 433. The regions of identity can comprise introns and/or exons and untranslated regions. The introduced sense polynucleotide may be present in the plant cell transiently, or may be stably integrated into a plant chromosome or extrachromosomal replicon.

[0151] Moreover, nucleic acid molecules encoding proteins from the same or other species such as protein analogs, orthologs and paralogs, are intended to be within the scope of the present invention. As used herein, the term “analogs” refers to two nucleic acids that have the same or similar function, but that have evolved separately in unrelated organisms. As used herein, the term “orthologs” refers to two nucleic acids from different species that have evolved from a common ancestral gene by speciation. Normally, orthologs encode proteins having the same or similar functions. As also used herein, the term “paralogs” refers to two nucleic acids that are related by duplication within a genome. Paralogs usually have different functions, but these functions may be related (Tatusov, R. L. et al. 1997 Science 278(5338):631-637). Analogs, orthologs and paralogs of naturally occurring proteins can differ from the naturally occurring proteins by post-translational modifications, by amino acid sequence differences, or by both. Post-translational modifications include in vivo and in vitro chemical derivatisation of polypeptides, e.g., acetylation, carboxylation, phosphorylation, or glycosylation, and such modifications may occur during polypeptide synthesis or processing or following treatment with isolated modifying enzymes. In particular, orthologs of the invention will generally exhibit at least 30%, more preferably 50%, and most preferably 90%, 91%, 92%, 93%, 94%, 95%, 96%, 97%, 98% or even 99% identity or homology with all or part of a naturally occurring protein amino acid sequence and will exhibit a function similar to a protein.

[0152] Such homologs, analogs, orthologs and paralogs will be referred to in general as homologs or being homologous throughout the present application. Homologs of the sequences given in SEQ ID NO: (2n+2) for n=0 to 40 and for n=47 to 433 are furthermore to be understood as meaning, for example, homologs, analogs, orthologs and paralogs which have at least 30% homology (=identity) at the derived amino acid level, preferably at least 50%, 60%, 70% or 80% homology, especially preferably at least 85% homology, very especially preferably 90%, 91%, 92%, 93%, 94%, homology, most preferably 95%, 96%, 97%, 98% or 99% homology. The homology (=identity) was calculated over the entire amino acid range. The program used was PileUp (J. Mol. Evolution., 25 (1987), 351-360, Higgens et al., CABIOS, 5 1989: 151-153) or the program Gap and BestFit [Needleman and Wunsch (J. Mol. Biol. 48; 443-453 (1970) and Smith and Waterman respectively (Adv. Appl. Math. 2; 482-489 (1981)] which are part of the GCG software package [Genetics Computer Group, 575 Science Drive, Madison, Wis., USA 53711 (1991)]. The above mentioned percentages of sequence homology are calculated with the program BestFit or Gap, preferably Gap, over the total sequence length with the following parameters used: Gap Weight: 8, Length Weight: 2.

[0153] Furthermore the invention provides a method of producing a transformed plant, wherein inactivation or down-regulation of a gene in the transformed plant results in increased tolerance and/or resistance to environmental stress as compared to a corresponding non-transformed wild type plant, comprising
[0154] (a) transforming a plant cell by inactivation or down-regulation of one or more genes, preferably encoded by one or more nucleic acids selected from a group consisting of the nucleic acids according to SEQ ID NO: (2n+1) for n=0 to 40 and for n=47 to 433 and/or homologs thereof and
[0155] (b) generating from the plant cell a transformed plant with an increased tolerance and/or resistance to environmental stress as compared to a corresponding wild type plant.

[0156] The invention also incorporates a method of inducing increased tolerance and/or resistance to environmental stress as compared to a corresponding non-transformed wild type plant in said plant cell or said plant by inactivation or down-regulation of one or more genes encoded by one or more nucleic acids selected from a group consisting of the nucleic acids according to SEQ ID NO: (2n+1) for n=0 to 40 and for n=47 to 433 and/or homologs thereof.

[0157] Preferably the nucleic acid is at least about 30%, especially at least 50% homologous to said sequence (see above). It is also possible that the homolog sequence stems form a plant selected from the group comprised of maize, wheat, rye, oat, triticale, rice, barley, soybean, peanut, cotton, rapeseed, canola, manihot, pepper, sunflower, flax, borage, safflower, linseed, primrose, rapeseed, turnip rape, tagetes, solanaceous plants, potato, tobacco, eggplant, tomato, Vicia species, pea, alfalfa, coffee, cacao, tea, Salix species, oil palm, coconut, perennial grass, forage crops and Arabidopsis thaliana, preferably Brassica napus, Glycine max, Zea mays or Oryza sativa.

[0158] Inactivation or down-regulation of said gene or genes may be achieved by all methods known to one skilled in the art, preferably by double-stranded RNA interference (dsRNAi), introduction of an antisense nucleic acid, a ribozyme, an antisense nucleic acid combined with a ribozyme, a nucleic acid encoding a co-suppressor, a nucleic acid encoding a dominant negative protein, DNA- or protein-binding factors targeting said gene or -RNA or -proteins, RNA degradation inducing viral nucleic acids and expression systems, systems for inducing a homolog recombination of said genes, mutations in said genes or a combination of the above.

[0159] The nucleic acid sequences of the invention or their homologs are isolated nucleic acid sequences which encode polypeptides. These nucleic acids or the polypeptides encoded by them and their biological and enzymatic activity are inactivated or downregulated in the method according to the invention which leads to increased resistance and/or tolerance to environmental stress.

[0160] In this context, inactivation means that the enzymatic or biological activity of the polypeptides encoded is no longer detectable in the organism or in the cell such as, for example, within the plant or plant cell. For the purposes of the invention, downregulation (=reduction) means that the enzymatic or biological activity of the polypeptides encoded is partly or essentially completely reduced in comparison with the activity of the untreated organism. This can be achieved by different cell-biological mechanisms. In this context, the activity can be downregulated in the entire organism or, in the case of multi-celled organisms, in individual parts of the organism, in the case of plants for example in tissues such as the seed, the leaf, the root or other parts. In this context, the enzymatic activity or biological activity is reduced by at least 10%, advantageously at least 20%, preferably at least 30%, especially preferably at least 40%, 50% or 60%, very especially preferably at least 70%, 80%, 90% or 95%, 99% or even 100% in comparison with the untreated organism. A particularly advantageous embodiment is the inactivation of the nucleic acids or of the polypeptides encoded by them.

[0161] Various strategies for reducing the quantity (=expression), the activity or the function of proteins encoded by the nucleic acids according to the invention are encompassed in accordance with the invention. The skilled worker will recognize that a series of different methods are available for influencing the quantity of a protein, the activity or the function in the desired manner.

[0162] A reduction in the activity or the function is preferably achieved by a reduced expression of a gene encoding an endogenous protein.

[0163] A reduction in the protein quantity, the activity or function can be achieved using the following methods:
[0164] a) introduction of a double-stranded RNA nucleic acid sequence (dsRNA) or of an expression cassette, or more than one expression cassette, ensuring the expression of the latter;
[0165] b) introduction of an antisense nucleic acid sequence or of an expression cassette ensuring the expression of the latter. Encompassed are those methods in which the antisense nucleic acid sequence is directed against a gene (i.e. genomic DNA sequences) or a gene transcript (i.e. RNA sequences). Also encompassed are α-anomeric nucleic acid sequences.
[0166] c) introduction of an antisense nucleic acid sequence in combination with a ribozyme or of an expression cassette ensuring the expression of the former
[0167] d) introduction of sense nucleic acid sequences for inducing cosuppression or of an expression cassette ensuring the expression of the former
[0168] e) introduction of a nucleic acid sequence encoding dominant-negative protein or of an expression cassette ensuring the expression of the latter
[0169] f) introduction of DNA-, RNA- or protein-binding factors against genes, RNA's or proteins or of an expression cassette ensuring the expression of the latter
[0170] g) introduction of viral nucleic acid sequences and expression constructs which bring about the degradation of RNA, or of an expression cassette ensuring the expression of the former
[0171] h) introduction of constructs for inducing homologous recombination on endogenous genes, for example for generating knockout mutants.
[0172] i) introduction of mutations into endogenous genes for generating a loss of function (e.g. generation of stop codons, reading-frame shifts and the like)

[0173] Each of these methods may bring about a reduction in the expression, the activity or the function for the purposes of the invention. A combined use is also feasible. Further methods are known to the skilled worker and may encompass hindering or preventing processing of the protein, transport of the protein or its mRNA, inhibition of ribosomal attachment, inhibition of RNA splicing, induction of an enzyme which degrades RNA and/or inhibition of translational elongation or termination.

[0174] The term “protein quantity” refers to the amount of a polypeptide in an organism, a tissue, a cell or cell compartment. The term “reduction” of the protein quantity refers to the quantitative reduction of the amount of a protein in an organism, a tissue, a cell or a cell compartment—for example by one of the methods described herein below—in comparison with the wild type of the same genus and species to which this method has not been applied under otherwise identical conditions (such as, for example, culture conditions, age of the plants and the like). In this context, a reduction of at least 10%, advantageously of at least 20%, preferably at least 30%, especially preferably of at least 40%, 50% or 60%, very especially preferably of at least 70%, 80%, 90% or 95%, 99% or even 100% in comparison with the untreated organism is advantageous. An especially advantageous embodiment is the inactivation of the nucleic acids, or of the polypeptides encoded by them.

[0175] The term “activity” preferably refers to the activity of a polypeptide in an organism, a tissue, a cell or a cell compartment. The term “reduction” in the activity refers to the reduction in the overall activity of a protein in an organism, a tissue, a cell or a cell compartment—for example by one of the methods described herein below—in comparison with the wild type of the same genus and species, to which this method has not been applied, under otherwise identical conditions (such as, for example, culture conditions, age of the plants and the like). In this context, a reduction in activity of at least 10%, advantageously of at least 20%, preferably at least 30%, especially preferably of at least 40%, 50% or 60%, very especially preferably of at least 70%, 80%, 90% or 95%, 99% or even 100% in comparison with the untreated organism is advantageous. A particularly advantageous embodiment is the inactivation of the nucleic acids or of the polypeptides encoded by them.

[0176] The term “function” preferably refers to the enzymatic or regulatory function of a peptide in an organism, a tissue, a cell or a cell compartment. Suitable substrates are low-molecular-weight compounds and also the protein interaction partners of a protein. The term “reduction” of the function refers, for example, to the quantitative reduction in binding capacity or binding strength of a protein for at least one substrate in an organism, a tissue, a cell or a cell compartment—for example by one of the methods described herein below—in comparison with the wild type of the same genus and species to which this method has not been applied, under otherwise identical conditions (such as, for example, culture conditions, age of the plants and the like). Reduction is also understood as meaning the modification of the substrate specificity as can be expressed for example, by the kcat/Km value. In this context, a reduction of the function of at least 10%, advantageously of at least 20%, preferably at least 30%, especially preferably of at least 40%, 50% or 60%, very especially preferably of at least 70%, 80%, 90% or 95%, 99% or even 100% in comparison with the untreated organism is advantageous. A particularly advantageous embodiment is the inactivation of the function. Binding partners for the protein can be identified in the manner with which the skilled worker is familiar, for example by the yeast 2-hybrid system.

[0177] What follows is a brief description of the individual preferred methods:

A) Introduction of a Double-Stranded RNA Nucleic Acid Sequence (dsRNA)

[0178] The method of regulating genes by means of double-stranded RNA (“double-stranded RNA interference”; dsRNAi) has been described extensively for animal and plant organisms (for example Matzke M A et al. (2000) Plant Mol. Biol. 43: 401-415; Fire A. et al. (1998) Nature 391: 806-811; WO 99/32619; WO 99/53050; WO 00/68374; WO 00/44914; WO 00/44895; WO 00/49035; WO 00/63364). The techniques and methods described in the above references are expressly referred to. Efficient gene suppression can also be observed in the case of transient expression or following transient transformation, for example as the consequence of a biolistic transformation (Schweizer P et al. (2000) Plant J 2000 24: 895-903). dsRNAi methods are based on the phenomenon that the simultaneous introduction of complementary strand and counterstrand of a gene transcript brings about highly effective suppression of the expression of the gene in question. The resulting phenotype is very similar to that of an analogous knock-out mutant (Waterhouse P M et al. (1998) Proc. Natl. Acad. Sci. USA 95:13959-64).

[0179] Tuschl et al. [Gens Dev., 1999, 13 (24): 3191-3197] was able to show that the efficiency of the RNAi method is a function of the length of the duplex, the length of the 3′-end overhangs, and the sequence in these overhangs. Based on the work of Tuschl et al. and assuming that the underlining principles are conserved between different species the following guidelines can be given to the skilled worker:
[0180] to achieve good results the 5′ and 3′ untranslated regions of the used nucleic acid sequence and regions close to the start codon should be ingeneral avoided as this regions are richer in regulatory protein binding sites and interactions between RNAi sequences and such regulatory proteins might lead to undesired interactions;
[0181] in plants the 5′ and 3′ untranslated regions of the used nucleic acid sequence and regions close to the start codon preferably 50 to 100 nt upstream of the start codon give good results and therefore should not be avoided;
[0182] preferably a region of the used mRNA is selected, which is 50 to 100 nt (=nucleotides or bases) downstream of the AUG start codon;
[0183] only dsRNA (=double-stranded RNA) sequences from exons are useful for the method, as sequences from introns have no effect;
[0184] the G/C content in this region should be greater than 30% and less than 70% ideally around 50%;
[0185] a possible secondary structure of the target mRNA is less important for the effect of the RNAi method.

[0186] The dsRNAi method has proved to be particularly effective and advantageous for reducing the expression of the nucleic acid sequences of sequences according to SEQ ID NO: (2n+1) for n=0 to 40 and for n=47 to 433 and/or homologs thereof. As described inter alia in WO 99/32619, dsRNAi approaches are clearly superior to traditional antisense approaches.

[0187] The invention therefore furthermore relates to double-stranded RNA molecules (dsRNA molecules) which, when introduced into an organism, advantageously into a plant (or a cell, tissue, organ or seed derived therefrom), bring about the reduction in the expression of the nucleic acid sequences of SEQ ID NO: (2n+1) for n=0 to 40 and for n=47 to 433 and/or homologs thereof. In a double-stranded RNA molecule for reducing the expression of an protein encoded by a nucleic acid sequence of one of sequences of SEQ ID NO: (2n+1) for n=0 to 40 and for n=47 to 433 and/or homologs thereof,
[0188] i) one of the two RNA strands is essentially identical to at least part of a nucleic acid sequence, and
[0189] ii) the respective other RNA strand is essentially identical to at least part of the complementary strand of a nucleic acid sequence.

[0190] The term “essentially identical” refers to the fact that the dsRNA sequence may also include insertions, deletions and individual point mutations in comparison to the target sequence while still bringing about an effective reduction in expression. Preferably, the homology as defined above amounts to at least 75%, preferably at least 80%, very especially preferably at least 90%, most preferably 100%, between the “sense” strand of an inhibitory dsRNA and a part-segment of a nucleic acid sequence of the invention (or between the “antisense” strand and the complementary strand of a nucleic acid sequence, respectively). The part-segment amounts to at least 10 bases, preferably at least 25 bases, especially preferably at least 50 bases, very especially preferably at least 100 bases, most preferably at least 200 bases or at least 300 bases in length. As an alternative, an “essentially identical” dsRNA may also be defined as a nucleic acid sequence which is capable of hybridizing with part of a gene transcript (for example in 400 mM NaCl, 40 mM PIPES pH 6.4, 1 mM EDTA at 50° C. or 70° C. for 12 to 16 h).

[0191] The dsRNA may consist of one or more strands of polymerized ribonucleotides. Modification of both the sugar-phosphate backbone and of the nucleosides may furthermore be present. For example, the phosphodiester bonds of the natural RNA can be modified in such a way that they encompass at least one nitrogen or sulfur hetero atom. Bases may undergo modification in such a way that the activity of, for example, adenosine deaminase is restricted. These and other modifications are described herein below in the methods for stabilizing antisense RNA. The dsRNA can be prepared enzymatically; it may also be synthesized chemically, either in full or in part.

[0192] Short dsRNA up to 30 bp, which effectively mediate RNA interference, can be for example efficiently generated by partial digestion of long dsRNA templates using E. coli ribonuclease III (RNase III). (Yang, D., et al. (2002) Proc. Natl. Acad. Sci. USA 99, 9942.)

[0193] The double-stranded structure can be formed starting from a single, self-complementary strand or starting from two complementary strands. In a single, self-complementary strand, “sense” and “antisense” sequence can be linked by a linking sequence (“linker”) and form for example a hairpin structure. Preferably, the linking sequence may take the form of an intron, which is spliced out following dsRNA synthesis. The nucleic acid sequence encoding a dsRNA may contain further elements such as, for example, transcription termination signals or polyadenylation signals. If the two strands of the dsRNA are to be combined in a cell or an organism advantageously in a plant, this can be brought about in a variety of ways:
[0194] a) transformation of the cell or of the organism, advantageously of a plant, with a vector encompassing the two expression cassettes,
[0195] b) cotransformation of the cell or of the organism, advantageously of a plant, with two vectors, one of which encompasses the expression cassettes with the “sense” strand while the other encompasses the expression cassettes with the “antisense” strand.
[0196] c) hybridization of two organisms, advantageously of plants, each of which has been transformed with one vector, one of which encompasses the expression cassettes with the “sense” strand while the other encompasses the expression cassettes with the “antisense” strand.
[0197] d) supertransformation of the cell or of the organism, advantageously of a plant, with a vector encompassing the expression cassettes with the “sense” strand, after the cell or the organism had already been transformed with a vector encompassing the expression cassettes with the “antisense” strand;
[0198] e) introduction of a construct comprising two promoters that lead to transcription of the desired sequence from both directions; and/or
[0199] f) infecting of the cell or of the organism with, advantageously of a plant, with an engeniered virus, which is able to produce the disered dsRNA molecule.
   Formation of the RNA Duplex can be Initiated Either Outside the Cell or within the Cell.

[0200] If the dsRNA is synthesized outside the target cell or organism it can be introduced into the organism or a cell of the organism by injection, microinjection, electroporation, high velocity particles, by laser beam or mediated by chemical compounds (DEAE-dextran, calciumphosphate, liposomes) or in case of animals it is also possible to feed bacteria such as E. coli strains engineered to express double-stranded RNAi to the animals.

[0201] As shown in WO 99/53050, the dsRNA may also encompass a hairpin structure, by linking the “sense” and “antisense” strands by a “linker” (for example an intron). The self-complementary dsRNA structures are preferred since they merely require the expression of a construct and always encompass the complementary strands in an equimolar ratio.

[0202] As shown in WO 99/53050, the dsRNA may also encompass a hairpin structure, by linking the “sense” and “antisense” strands by a “linker” (for example an intron). The self-complementary dsRNA structures are preferred since they merely require the expression of a construct and always encompass the complementary strands in an equimolar ratio.

[0203] The expression cassettes encoding the “antisense” or the “sense” strand of the dsRNA or the self-complementary strand of the dsRNA are preferably inserted into a vector and stably inserted into the genome of a plant, using the methods described herein below (for example using selection markers), in order to ensure permanent expression of the dsRNA.

[0204] The dsRNA can be introduced using an amount which makes possible at least one copy per cell. A larger amount (for example at least 5, 10, 100, 500 or 1 000 copies per cell) may bring about more efficient reduction.

[0205] As has already been described, 100% sequence identity between the dsRNA and a gene transcript of a nucleic acid sequence of sequences according to SEQ ID NO: (2n+1) for n=0 to 40 and for n=47 to 433 or it's homolog is not necessarily required in order to bring about effective reduction in the expression. The advantage is, accordingly, that the method is tolerant with regard to sequence deviations as may be present as a consequence of genetic mutations, polymorphisms or evolutionary divergences. Thus, for example, using the dsRNA, which has been generated starting from a sequence of one of sequences of the nucleic acid according to SEQ ID NO: (2n+1) for n=0 to 40 and for n=47 to 433 or homologs thereof of the one organism, may be used to suppress the corresponding expression in another organism.

[0206] Due to the high degree of sequence homology between the sequences according to SEQ ID NO: (2n+1) for n=0 to 40 and for n=47 to 433 from various organisms (e.g. plants), i.e. proteins may be conserved to a high degree within, for example other plants, it is optionally possible that the expression of a dsRNA derived from one of the disclosed sequences according to SEQ ID NO: (2n+1) for n=0 to 40 and for n=47 to 433 or homologs thereof also has an advantageous effect in other plant species.

[0207] The dsRNA can be synthesized either in vivo or in vitro. To this end, a DNA sequence encoding a dsRNA can be introduced into an expression cassette under the control of at least one genetic control element (such as, for example, promoter, enhancer, silencer, splice donor or splice acceptor or polyadenylation signal). Suitable advantageous constructs are described herein below. Polyadenylation is not required, nor do elements for initiating translation have to be present.

[0208] A dsRNA can be synthesized chemically or enzymatically. Cellular RNA polymerases or bacteriophage RNA polymerases (such as, for example T3, T7 or SP6 RNA polymerase) can be used for this purpose. Suitable methods for the in-vitro expression of RNA are described (WO 97/32016; U.S. Pat. No. 5,593,874; U.S. Pat. No. 5,698,425, U.S. Pat. No. 5,712,135, U.S. Pat. No. 5,789,214, U.S. Pat. No. 5,804,693). Prior to introduction into a cell, tissue or organism, a dsRNA which has been synthesized in vitro either chemically or enzymatically can be isolated to a higher or lesser degree from the reaction mixture, for example by extraction, precipitation, electrophoresis, chromatography or combinations of these methods. The dsRNA can be introduced directly into the cell or else be applied extracellularly (for example into the interstitial space).

[0209] Stable transformation of the plant with an expression construct which brings about the expression of the dsRNA is preferred, however. Suitable methods are described herein below.

### B) Introduction of an Antisense Nucleic Acid Sequence

[0210] Methods for suppressing a specific protein by preventing the accumulation of its mRNA by means of “antisense” technology can be used widely and has been described extensively, including for plants (Sheehy et al. (1988) Proc. Natl. Acad. Sci. USA 85: 8805-8809; U.S. Pat. No. 4,801,100; Mol J N et al. (1990) FEBS Lett 268(2): 427-430). The antisense nucleic acid molecule hybridizes with, or binds to, the cellular mRNA and/or the genomic DNA encoding the target protein to be suppressed. This process suppresses the transcription and/or translation of the target protein. Hybridization can be brought about in the conventional manner via the formation of a stable duplex or, in the case of genomic DNA, by the antisense nucleic acid molecule binding to the duplex of the genomic DNA by specific interaction in the large groove of the DNA helix.

[0211] An antisense nucleic acid sequence which is suitable for reducing the activity of a protein can be deduced using the nucleic acid sequence encoding this protein, for example the nucleic acid sequence as shown in SEQ ID NO: (2n+1) for n=0 to 40 and for n=47 to 433 (or homologs, analogs, paralogs, orthologs thereof), by applying the base-pair rules of Watson and Crick. The antisense nucleic acid sequence can be complementary to all of the transcribed mRNA of the protein; it may be limited to the coding region, or it may only consist of one oligonucleotide which is complementary to part of the coding or noncoding sequence of the mRNA. Thus, for example, the oligonucleotide can be complementary to the nucleic acid region which encompasses the translation start for the protein. Antisense nucleic acid sequences may have an advantageous length of, for example, 5, 10, 15, 20, 25, 30, 35, 40, 45 or 50 nucleotides but they may also be longer and encompass at least 100, 200, 500, 1000, 2000 or 5000 nucleotides. Preferred is a length of 15-35, more preferred a length of 15, 20, 2, 30 or 35 nucleotides. Antisense nucleic acid sequences can be expressed recombinantly or synthesized chemically or enzymatically using methods known to the skilled worker. In the case of chemical synthesis, natural or modified nucleotides may be used. Modified nucleotides may confer increased biochemical stability to the antisense nucleic acid sequence and lead to an increased physical stability of the duplex formed by antisense nucleic acid sequence and sense target sequence. Examples of substances which can be used are phosphorothioate derivatives and acridine-substituted nucleotides such as 5-fluorouracil, 5-bromouracil, 5-chlorouracil, 5-iodouracil, hypoxanthin, xanthin, 4-acetylcytosine, 5-(carboxyhydroxymethyl)uracil, 5-carboxymethylaminomethyl-2-thiouridine, 5-carboxymethylaminomethyl uracil, dihydrouracil, β-D-galactosylqueosine, inosine, N6-isopentenyladenine, 1-methyl-guanine, 1-methylinosine, 2,2-dimethylguanine, 2-methyladenine, 2-methylguanine, 3-methylcytosine, 5-methylcytosine, N6-adenine, 7-methylguanine, 5-methylamino-methyluracil, 5-methoxyaminomethyl-2-thiouracil, β-D-mannosylqueosine, 5′-methoxy-carboxymethyluracil, 5-methoxyuracil, 2-methylthio-N-6-isopentenyladenine, uracil-5-oxyacetic acid, pseudouracil, queosine, 2-thiocytosine, 5-methyl-2-thiouracil, 2-thiouracil, 4-thiouracil, 5-methyluracil, methyl uracil-5-oxyacetate, uracil-5-oxyacetic acid, 5-methyl-2-thiouracil, 3-(3-amino-3-N-2-carboxypropyl)uracil and 2,6-diaminopurine.

[0212] In a further preferred embodiment, the expression of a protein encoded by one of sequences of SEQ ID NO: (2n+2) for n=0 to 40 and for n=47 to 433 or homologs, analogs, paralogs, orthologs thereof can be inhibited by nucleotide sequences which are complementary to the regulatory region of a gene (for example a promoter and/or enhancer) and which form triplex structures with the DNA double helix in this region so that the transcription of the gene is reduced. Such methods have been described (Helene C (1991) Anticancer Drug Res. 6(6): 569-84; Helene C et al. (1992) Ann. NY Acad. Sci. 660: 27-36; Maher L J (1992) Bioassays 14(12): 807-815).

[0213] In a further embodiment, the antisense nucleic acid molecule can be an α-anomeric nucleic acid. Such α-anomeric nucleic acid molecules form specific double-stranded hybrids with complementary RNA in which—as opposed to the conventional β-nucleic acids—the two strands run in parallel with one another (Gautier C et al. (1987) Nucleic Acids Res. 15: 6625-6641). Furthermore, the antisense nucleic acid molecule can also comprise 2′-O-methylribonucleotides (Inoue et al. (1987) Nucleic Acids Res. 15: 6131-6148) or chimeric RNA-DNA analogs (Inoue et al. (1987) FEBS Lett 215: 327-330).

[0214] The antisense nucleic acid molecules of the invention are typically administered to a cell or generated in situ such that they hybridize with or bind to cellular mRNA and/or genomic DNA encoding a polypeptide having the biological activity of protein of the invention thereby inhibit expression of the protein, e.g., by inhibiting transcription and/or translation and leading to the aforementioned compound X increasing activity.

[0215] The antisense molecule of the present invention comprises also a nucleic acid molecule comprising a nucleotide sequences complementary to the regulatory region of an nucleotide sequence encoding the natural occurring polypeptide of the invention, e.g. the polypeptide sequences shown in the sequence listing, or identified according to the methods described herein, e.g., its promoter and/or enhancers, e.g. to form triple helical structures that prevent transcription of the gene in target cells. See generally, Helene, C. (1991) Anticancer Drug Des. 6(6):569-84; Helene, C. et al. (1992) Ann. N.Y. Acad. Sci. 660:27-36; and Maher, L. J. (1992) Bioassays 14(12):807-15.

C) Introduction of an Antisense Nucleic Acid Sequence Combined with a Ribozyme

[0216] It is advantageous to combine the above-described antisense strategy with a ribozyme method. Catalytic RNA molecules or ribozymes can be adapted to any target RNA and cleave the phosphodiester backbone at specific positions, thus functionally deactivating the target RNA (Tanner N K (1999) FEMS Microbiol. Rev. 23(3): 257-275). The ribozyme per se is not modified thereby, but is capable of cleaving further target RNA molecules in an analogous manner, thus acquiring the properties of an enzyme. The incorporation of ribozyme sequences into “antisense” RNAs imparts this enzyme-like RNA-cleaving property to precisely these “antisense” RNAs and thus increases their efficiency when inactivating the target RNA. The preparation and the use of suitable ribozyme “antisense” RNA molecules is described, for example, by Haseloff et al. (1988) Nature 310: 585-591.

[0217] In this manner, ribozymes [for example “Hammerhead” ribozymes; Haselhoff and Gerlach (1988) Nature 310: 585-591] can be used to catalytically cleave the mRNA of an enzyme to be suppressed and to prevent translation. The ribozyme technology can increase the efficacy of an antisense strategy. Methods for expressing ribozymes for reducing specific proteins are described in (EP 0 291 533, EP 0 321 201, EP 0 360 257). Ribozyme expression has also been described for plant cells (Steinecke P et al. (1992) EMBO J 11(4): 1525-1530; de Feyter R et al. (1996) Mol. Gen. Genet. 250(3): 329-338). Suitable target sequences and ribozymes can be identified for example as described by Steinecke P, Ribozymes, Methods in Cell Biology 50, Galbraith et al. eds, Academic Press, Inc. (1995), pp. 449-460 by calculating the secondary structures of ribozyme RNA and target RNA and by their interaction [Bayley C C et al. (1992) Plant Mol. Biol. 18(2): 353-361; Lloyd A M and Davis R W et al. (1994) Mol. Gen. Genet. 242(6): 653-657]. For example, derivatives of the tetrahymena L-19 IVS RNA which have complementary regions to the mRNA of the protein to be suppressed can be constructed (see also U.S. Pat. No. 4,987,071 and U.S. Pat. No. 5,116,742). As an alternative, such ribozymes can also be identified from a library of a variety of ribozymes via a selection process (Bartel D and Szostak J W (1993) Science 261: 1411-1418).

### D) Introduction of a (Sense) Nucleic Acid Sequence for Inducing Cosuppression

[0218] The expression of a nucleic acid sequence in sense orientation can lead to cosuppression of the corresponding homologous, endogenous genes. The expression of sense RNA with homology to an endogenous gene can reduce or indeed eliminate the expression of the endogenous gene, in a similar manner as has been described for the following antisense approaches: Jorgensen et al. [(1996) Plant Mol. Biol. 31(5): 957-973], Goring et al. [(1991) Proc. Natl. Acad. Sci. USA 88:1770-1774], Smith et al. [(1990) Mol. Gen. Genet. 224: 447-481], Napoli et al. [(1990) Plant Cell 2: 279-289] or Van der Krol et al. [(1990) Plant Cell 2: 291-99]. In this context, the construct introduced may represent the homologous gene to be reduced either in full or only in part. The application of this technique to plants has been described for example by Napoli et al. [(1990) The Plant Cell 2: 279-289 and in U.S. Pat. No. 5,010,323].

### E) Introduction of Nucleic Acid Sequences Encoding a Dominant-Negative Protein

[0219] The function or activity of a protein can efficiently also be reduced by expressing a dominant-negative variant of said protein. The skilled worker is familiar with methods for reducing the function or activity of a protein by means of coexpression of its dominant-negative form [Lagna G and Hemmati-Brivanlou A (1998) Current Topics in Developmental Biology 36: 75-98; Perlmutter R M and Alberola-Iia J (1996) Current Opinion in Immunology 8(2): 285-90; Sheppard D (1994) American Journal of Respiratory Cell & Molecular Biology 11(1): 1-6; Herskowitz 1 (1987) Nature 329 (6136): 219-22].

[0220] A dominant-negative variant can be realized for example by changing of an amino acid in the proteins encoded by one of sequences of SEQ ID NO: (2n+2) for n=0 to 40 and for n=47 to 433 or homologs thereof. This change can be determined for example by computer aided comparison (“alignment”). These mutations for achieving a dominant-negative variant are preferably carried out at the level of the nucleic acid sequences. A corresponding mutation can be performed for example by PCR-mediated in-vitro mutagenesis using suitable oligonucleotide primers by means of which the desired mutation is introduced. To this end, methods are used with which the skilled worker is familiar. For example, the “LA PCR in vitro Mutagenesis Kit” (Takara Shuzo, Kyoto) can be used for this purpose. It is also possible and known to those skilled in the art that deleting or changing of functional domains, e.g. TF or other signaling components which can bind but not activate may achieve the reduction of protein activity.

### F) Introduction of DNA- or Protein-Binding Factors Against Genes, RNAs or Proteins

[0221] A reduction in the expression of a gene encoded by one of sequences of SEQ ID NO: (2n+2) for n=0 to 40 and for n=47 to 433 or homologs thereof according to the invention can also be achieved with specific DNA-binding factors, for example factors of the zinc finger transcription factor type. These factors attach to the genomic sequence of the endogenous target gene, preferably in the regulatory regions, and bring about repression of the endogenous gene. The use of such a method makes possible the reduction in the expression of an endogenous gene without it being necessary to recombinantly manipulate the sequence of the latter. Such methods for the preparation of relevant factors are described in Dreier B et al. [(2001) J. Biol. Chem. 276(31): 29466-78 and (2000) J. Mol. Biol. 303(4): 489-502], Beerli R R et al.

[0222] [(1998) Proc. Natl. Acad. Sci. USA 95(25): 14628-14633; (2000) Proc. Natl. Acad. Sci. USA 97(4): 1495-1500 and (2000) J. Biol. Chem. 275(42): 32617-32627)], Segal D J and Barbas C F [3rd (2000) Curr. Opin. Chem. Biol. 4(1): 10-39], Kang J S and Kim J S [(2000) J. Biol. Chem. 275(12): 8742-8748], Kim J S et al. [(1997) Proc. Natl. Acad. Sci. USA 94(8): 3616-3620], Klug A [(1999) J. Mol. Biol. 293(2): 215-218], Tsai S Y et al. [(1998) Adv. Drug Deliv. Rev. 30(1-3): 23-31], Mapp A K et al. [(2000) Proc. Natl. Acad. Sci. USA 97(8): 3930-3935], Sharrocks A D et al. [(1997) Int. J. Biochem. Cell Biol. 29(12): 1371-1387] and Zhang L et al. [(2000) J. Biol. Chem. 275(43): 33850-33860]. Examples for the application of this technology in plants have been described in WO 01/52620, Ordiz M I et al., (Proc. Natl. Acad. Sci. USA, Vol. 99, Issue 20, 13290-13295, 2002) or Guan et al., (Proc. Natl. Acad. Sci. USA, Vol. 99, Issue 20, 13296-13301, 2002)

[0223] These factors can be selected using any portion of a gene. This segment is preferably located in the promoter region. For the purposes of gene suppression, however, it may also be located in the region of the coding exons or introns. The skilled worker can obtain the relevant segments from Genbank by database search or starting from a cDNA whose gene is not present in Genbank by screening a genomic library for corresponding genomic clones.

[0224] It is also possible to first identify sequences in a target crop which are encoded by one of sequences of SEQ ID NO: (2n+1) for n=0 to 40 and for n=47 to 433 or homologs thereof, then find the promoter and reduce expression by the use of the above mentioned factors.

[0225] The skilled worker is familiar with the methods required for doing so.

[0226] Furthermore, factors which are introduced into a cell may also be those which themselves inhibit the target protein. The protein-binding factors can, for example, be aptamers [Famulok M and Mayer G (1999) Curr. Top Microbiol. Immunol. 243: 123-36] or antibodies or antibody fragments or single-chain antibodies. Obtaining these factors has been described, and the skilled worker is familiar therewith. For example, a cytoplasmic scFv antibody has been employed for modulating activity of the phytochrome A protein in genetically modified tobacco plants [Owen M et al. (1992) Biotechnology (NY) 10(7): 790-794; Franken E et al. (1997) Curr. Opin. Biotechnol. 8(4): 411-416; Whitelam (1996) Trend Plant Sci. 1: 286-272].

[0227] Gene expression may also be suppressed by tailor-made low-molecular-weight synthetic compounds, for example of the polyamide type [Dervan P B and Burli R W (1999) Current Opinion in Chemical Biology 3: 688-693; Gottesfeld J M et al. (2000) Gene Expr. 9(1-2): 77-91]. These oligomers consist of the units 3-(dimethylamino)propylamine, N-methyl-3-hydroxypyrrole, N-methylimidazole and N-methylpyrroles; they can be adapted to each portion of double-stranded DNA in such a way that they bind sequence-specifically to the large groove and block the expression of the gene sequences located in this position. Suitable methods have been described in Bremer R E et al. [(2001) Bioorg. Med. Chem. 9(8): 2093-103], Ansari A Z et al. [(2001) Chem. Biol. 8(6): 583-92], Gottesfeld J M et al. [(2001) J. Mol. Biol. 309(3): 615-29], Wurtz N R et al. [(2001) Org. Lett 3(8): 1201-3], Wang C C et al. [(2001) Bioorg. Med. Chem. 9(3): 653-7], Urbach A R and Dervan P B [(2001) Proc. Natl. Acad. Sci. USA 98(8): 4103-8] and Chiang S Y et al. [(2000) J. Biol. Chem. 275(32): 24246-54].

G) Introduction of Viral Nucleic Acid Sequences and Expression Constructs which Bring About the Degradation of RNA

[0228] Inactivation or downregulation can also be efficiently brought about by inducing specific RNA degradation by the organism, advantageously in the plant, with the aid of a viral expression system (Amplikon) [Angell, S M et al. (1999) Plant J. 20(3): 357-362]. Nucleic acid sequences with homology to the transcripts to be suppressed are introduced into the plant by these systems—also referred to as “VIGS” (viral induced gene silencing) with the aid of viral vectors. Then, transcription is switched off, presumably mediated by plant defense mechanisms against viruses. Suitable techniques and methods are described in Ratcliff F et al. [(2001) Plant J. 25(2): 237-45], Fagard M and Vaucheret H [(2000) Plant Mol. Biol. 43(2-3): 285-93], Anandalakshmi R et al. [(1998) Proc. Natl. Acad. Sci. USA 95(22): 13079-84] and Ruiz M T [(1998) Plant Cell 10(6): 937-46].

### H) Introduction of Constructs for Inducing a Homologous Recombination on Endogenous Genes, for Example for Generating Knock-Out Mutants

[0229] To generate a homologously-recombinant organism with reduced activity, a nucleic acid construct is used which, for example, comprises at least part of an endogenous gene which is modified by a deletion, addition or substitution of at least one nucleotide in such a way that the functionality is reduced or completely eliminated. The modification may also affect the regulatory elements (for example the promoter) of the gene so that the coding sequence remains unmodified, but expression (transcription and/or translation) does not take place and is reduced.

[0230] In the case of conventional homologous recombination, the modified region is flanked at its 5′ and 3′ end by further nucleic acid sequences which must be sufficiently long for allowing recombination. Their length is, as a rule, in a range of from one hundred bases up to several kilobases [Thomas K R and Capecchi M R (1987) Cell 51: 503; Strepp et al. (1998) Proc. Natl. Acad. Sci. USA 95(8): 4368-4373]. In the case of homologous recombination, the host organism—for example a plant—is transformed with the recombination construct using the methods described herein below, and clones which have successfully undergone recombination are selected using for example a resistance to antibiotics or herbicides. Using the cotransformation technique, the resistance to antibiotics or herbicides can subsequently advantageously be re-eliminated by performing crosses. An example for an efficient homologous recombination system in plants has been published in Nat. Biotechnol. 2002 October; 20(10):1030-4, Terada R et al.: Efficient gene targeting by homologous recombination in rice.

[0231] Homologous recombination is a relatively rare event in higher eukaryotes, especially in plants. Random integrations into the host genome predominate. One possibility of removing the randomly integrated sequences and thus increasing the number of cell clones with a correct homologous recombination is the use of a sequence-specific recombination system as described in U.S. Pat. No. 6,110,736, by means of which unspecifically integrated sequences can be deleted again, which simplifies the selection of events which have integrated successfully via homologous recombination. A multiplicity of sequence-specific recombination systems may be used, examples which may be mentioned being Cre/Iox system of bacteriophage P1, the FLP/FRT system from yeast, the Gin recombinase of phage Mu, the Pin recombinase from E. coli and the R/RS system of the pSR1 plasmid. The bacteriophage P1 Cre/Iox system and the yeast FLP/FRT system are preferred. The FLP/FRT and the cre/Iox recombinase system have already been applied to plant systems [Odell et al. (1990) Mol. Gen. Genet. 223: 369-378].

l) Introduction of Mutations into Endogenous Genes for Bringing about a Loss of Function (For Example Generation of Stop Codons, Reading-Frame Shifts and the Like)

[0232] Further suitable methods for reducing activity are the introduction of nonsense mutations into endogenous genes, for example by introducing RNA/DNA oligonucleotides into the plant [Zhu et al. (2000) Nat. Biotechnol. 18(5): 555-558], and the generation of knock-out mutants with the aid of, for example, T-DNA mutagenesis [Koncz et al. (1992) Plant Mol. Biol. 20(5): 963-976], ENU-(N-ethyl-N-nitrosourea)-mutagenesis or homologous recombination [ENU-(N-ethyl-N-nitrosourea)-mutagenesis or homologous recombination [Hohn B and Puchta (1999) H. Proc. Natl. Acad. Sci. USA 96: 8321-8323]. Point mutations may also be generated by means of DNA-RNA hybrids also known as “chimeraplasty” [Cole-Strauss et al. (1999) Nucl. Acids Res. 27(5): 1323-1330; Kmiec (1999) Gene Therapy American Scientist 87(3): 240-247]. The mutation sites may be specifically targeted or randomly selected.

[0233] Nucleic acid sequences as described in item B) to 1) are expressed in the cell or organism by transformation/transfection of the cell or organism or are introduced in the cell or organism by known methods, for example as disclosed in item A).

[0234] Other suitable method for reducing activity is the introduction of a nucleic acid in the plant cell, which interacts with a gene encoded by one or more nucleic acid sequences selected from the group consisting of sequences of SEQ ID NO: (2n+1) for n=0 to 40 and for n=47 to 433 and/or homologs thereof. The interaction of the introduced nucleic acid, which can be active itself, with said gene leads by deletion, inversion or insertion finally to inactivation, i.e. by frameshift, or destruction of said gene.

[0235] In particular, the invention provides a method of producing a transformed plant with a gene encoding nucleic acid, wherein inactivation or down-regulation of said gene(s) in the plant results in increased tolerance to environmental stress as compared to a wild type plant, comprising the inactivation or down-regulation by mutation of a nucleic acid sequence of SEQ ID NO: (2n+1) for n=0 to 40 and for n=47 to 433 or homologs thereof.

[0236] For such plant transformation, binary vectors such as pBinAR can be used (Höfgen and Willmitzer, 1990 Plant Science 66:221-230). Moreover suitable binary vectors are such as pBIN19, pBI101, pGPTV or pPZP (Hajukiewicz, P. et al., 1994, Plant Mol. Biol., 25: 989-994). An overview of binary vectors and their specific features is given in Hellens et al., 2000, Trends in plant science, 5: 446-451.

[0237] Construction of the binary vectors can be performed by ligation of the cDNA in sense or antisense orientation into the T-DNA. 5-prime to the cDNA a plant promoter activates transcription of the cDNA. A polyadenylation sequence is located 3-prime to the cDNA. Tissue-specific expression can be achieved by using a tissue specific promoter as listed below. Also, any other promoter element can be used. For constitutive expression within the whole plant, the CaMV 35S promoter can be used. The expressed protein can be targeted to a cellular compartment using a signal peptide, for example for plastids, mitochondria or endoplasmic reticulum (Kermode, 1996 Crit. Rev. Plant Sci. 4(15):285-423). The signal peptide is cloned 5-prime in frame to the cDNA to archive subcellular localization of the fusion protein. Additionally, promoters that are responsive to abiotic stresses can be used with, such as the Arabidopsis promoter RD29A. One skilled in the art will recognize that the promoter used should be operatively linked to the nucleic acid such that the promoter causes transcription of the nucleic acid which results in the synthesis of a mRNA which encodes a polypeptide. Alternatively, the RNA can be an antisense RNA for use in affecting subsequent expression of the same or another gene or genes.

[0238] Alternate methods of transfection include the direct transfer of DNA into developing flowers via electroporation or Agrobacterium mediated gene transfer. Agrobacterium mediated plant transformation can be performed using for example the GV3101 (pMP90) (Koncz and Schell, 1986 Mol. Gen. Genet. 204:383-396) or LBA4404 (Ooms et al., Plasmid, 1982, 7: 15-29; Hoekema et al., Nature, 1983, 303: 179-180) Agrobacterium tumefaciens strain. Transformation can be performed by standard transformation and regeneration techniques (Deblaere et al., 1994 Nucl. Acids. Res. 13:4777-4788; Gelvin and Schilperoort, Plant Molecular Biology Manual, 2nd Ed.-Dordrecht: Kluwer Academic Publ., 1995.—in Sect., Ringbuch Zentrale Signatur: BT11-P ISBN 0-7923-2731-4; Glick, B R and Thompson, J E, Methods in Plant Molecular Biology and Biotechnology, Boca Raton: CRC Press, 1993.-360 S., ISBN 0-8493-5164-2). For example, rapeseed can be transformed via cotyledon or hypocotyl transformation (Moloney et al., 1989 Plant Cell Reports 8:238-242; De Block et al., 1989 Plant Physiol. 91:694-701). Use of antibiotics for Agrobacterium and plant selection depends on the binary vector and the Agrobacterium strain used for transformation. Rapeseed selection is normally performed using kanamycin as selectable plant marker. Agrobacterium mediated gene transfer to flax can be performed using, for example, a technique described by Mlynarova et al., 1994 Plant Cell Report 13:282-285. Additionally, transformation of soybean can be performed using for example a technique described in European Patent No. 0424 047, U.S. Pat. No. 5,322,783, European Patent No. 0397 687, U.S. Pat. No. 5,376,543 or U.S. Pat. No. 5,169,770. Transformation of maize can be achieved by particle bombardment, polyethylene glycol mediated DNA uptake or via the silicon carbide fiber technique. (See, for example, Freeling and Walbot “The maize handbook” Springer Verlag: New York (1993) ISBN 3-540-97826-7). A specific example of maize transformation is found in U.S. Pat. No. 5,990,387 and a specific example of wheat transformation can be found in PCT Application No. WO 93/07256.

[0239] In particular, a useful method to ascertain the level of transcription or activity of the gene (an indicator of the amount of mRNA available for translation to the gene product) is to perform a Northern blot (for reference see, for example, Ausubel et al., 1988 Current Protocols in Molecular Biology, Wiley: New York). This information at least partially demonstrates the degree of transcription of the transformed gene. Total cellular RNA can be prepared from cells, tissues or organs by several methods, all well-known in the art, such as that described in Bormann, E. R. et al., 1992 Mol. Microbiol. 6:317-326. To assess the presence or relative quantity of protein translated from this mRNA, standard techniques, such as a Western blot, may be employed. These techniques are well known to one of ordinary skill in the art. (See for example Ausubel et al., 1988 Current Protocols in Molecular Biology, Wiley: New York). The use of Real Time PCR is also possible.

[0240] The invention may further be combined with an isolated recombinant expression vector comprising a stress related protein encoding nucleic acid, wherein expression of the vector or stress related protein encoding nucleic acid, respectively in a host cell results in increased tolerance and/or resistance to environmental stress as compared to the wild type of the host cell. As used herein, the term “vector” refers to a nucleic acid molecule capable of transporting another nucleic acid to which it has been linked. One type of vector is a “plasmid”, which refers to a circular double stranded DNA loop into which additional DNA segments can be ligated. Another type of vector is a viral vector, wherein additional DNA segments can be ligated into the viral genome. Certain vectors are capable of autonomous replication in a host cell into which they are introduced (e.g., bacterial vectors having a bacterial origin of replication and episomal mammalian vectors). Other vectors (e.g., non-episomal mammalian vectors) are integrated into the genome of a host cell upon introduction into the host cell, and thereby are replicated along with the host genome. Moreover, certain vectors are capable of directing the expression of genes to which they are operatively linked. Such vectors are referred to herein as “expression vectors”. In general, expression vectors of utility in recombinant DNA techniques are often in the form of plasmids. In the present specification, “plasmid” and “vector” can be used interchangeably as the plasmid is the most commonly used form of vector. However, the invention is intended to include such other forms of expression vectors, such as viral vectors (e.g., replication defective retroviruses), which serve equivalent functions.

[0241] A plant expression cassette comprising a nucleic acid construct, which when expressed allows inactivation or down-regulation of a gene encoded by a nucleic acid selected from the group consisting of sequences according to SEQ ID NO: (2n+1) for n=0 to 40 and for n=47 to 433 and/or homologs thereof and/or parts thereof by a method mentioned above leading to increased stress tolerance and/or resistance is also included in the scope of the present invention.

[0242] The plant expression cassette preferably contains regulatory sequences capable of driving gene expression in plant cells and operably linked so that each sequence can fulfill its function, for example, termination of transcription by polyadenylation signals. Preferred polyadenylation signals are those originating from Agrobacterium tumefaciens T-DNA such as the gene 3 known as octopine synthase of the Ti-plasmid pTiACH5 (Gielen et al., 1984 EMBO J. 3:835) or functional equivalents thereof but also all other terminators functionally active in plants are suitable.

[0243] Plant gene expression must be operably linked to an appropriate promoter conferring gene expression in a time, cell or tissue specific manner. Preferred promoters are such that drive constitutive expression (Benfey et al., 1989 EMBO J. 8:2195-2202) like those derived from plant viruses like the 35S CaMV (Franck et al., 1980 Cell 21:285-294), the 19S CaMV (see also U.S. Pat. No. 5,352,605 and PCT Application No. WO 8402913) or plant promoters like those from Rubisco small subunit described in U.S. Pat. No. 4,962,028.

[0244] Additional advantageous regulatory sequences are, for example, included in the plant promoters such as CaMV/35S [Franck et al., Cell 21 (1980) 285-294], PRP1 [Ward et al., Plant. Mol. Biol. 22 (1993)], SSU, OCS, lib4, usp, STLS1, B33, LEB4, nos or in the ubiquitin, napin or phaseolin promoter. Additional useful plant promoters are the cytosolic FBPase promoter or ST-LSI promoter of the potato (Stockhaus et al., EMBO J. 8, 1989, 2445), the phosphorybosyl phyrophoshate amido transferase promoter of Glycine max (gene bank accession No. U87999) or the noden specific promoter described in EP-A-0 249 676. Additional particularly advantageous promoters are seed specific promoters which can be used for monocotyledons or dicotyledons. Described in U.S. Pat. No. 5,608,152 (napin promoter from rapeseed), WO 98/45461 (phaseolin promoter from Arobidopsis), U.S. Pat. No. 5,504,200 (phaseolin promoter from Phaseolus vulgaris), WO 91/13980 (Bce4 promoter from Brassica) and Baeumlein et al., Plant J., 2, 2, 1992: 233-239 (LEB4 promoter from Ieguminosa) are promoters useful in dicotyledons. The following promoters are useful for example in monocotyledons Ipt-2- or Ipt-1-promoter from barley (WO 95/15389 and WO 95/23230) or hordein promoter from barley. Other useful promoters described in WO 99/16890.

[0245] It is possible in principle to inactivate or down-regulate all natural promoters with their regulatory sequences like those mentioned above in order to e.g. reduce the level of production of a targeted protein.

[0246] The construct may also comprise further genes which are to be inserted into the organisms and which are for example involved in stress resistance, i.e. next to inactivating certain genes or incorporating inactivated genes at their place, it is possible to introduce favorable genes that are related to production of proteins which actively increase stress tolerance or resistance. It is therefore feasible and advantageous to insert and express in host organisms regulatory genes such as genes for inducers, repressors or enzymes which intervene by their enzymatic activity in the regulation of one or more or all genes of a biosynthetic pathway. These genes can be heterologous or homologous in origin. The inserted genes may have their own promoter or else be under the control of same promoter as sequences of SEQ ID NO: (2n+1) for n=0 to 40 and for n=47 to 433 or their homologs.

[0247] The gene construct advantageously comprises, for expression of the other genes present, additionally 3′ and/or 5′ terminal regulatory sequences to enhance expression, which are selected for optimal expression depending on the selected host organism and gene or genes.

[0248] These regulatory sequences are intended to make specific expression of the genes and protein expression possible as mentioned above. This may mean, depending on the host organism, for example that the gene is expressed or overexpressed only after induction, or that it is immediately expressed and/or overexpressed.

[0249] The regulatory sequences or factors may moreover preferably have a beneficial effect on expression of the introduced genes, and thus increase it. It is possible in this way for the regulatory elements to be enhanced advantageously at the transcription level by using strong transcription signals such as promoters and/or enhancers. However, in addition, it is also possible to enhance translation by, for example, improving the stability of the mRNA.

[0250] Other preferred sequences for use in plant gene expression cassettes are targeting-sequences necessary to direct the gene product in its appropriate cell compartment (for review see Kermode, 1996 Crit. Rev. Plant Sci. 15(4):285-423 and references cited therein) such as the vacuole, the nucleus, all types of plastids like amyloplasts, chloroplasts, chromoplasts, the extracellular space, mitochondria, the endoplasmic reticulum, oil bodies, peroxisomes and other compartments of plant cells.

TABLE 1
Examples of Tissue-specific and Stress inducible promoters in plants

| Expression | Reference |
|---|---|
| Cor78-Cold, drought, salt, | Ishitani, et al., Plant Cell 9: 1935-1949 (1997). |
| ABA, wounding-inducible | Yamaguchi-Shinozaki and Shinozaki, Plant Cell 6: 251-264 |
| | (1994). |
| Rci2A - Cold, dehydration- | Capel et al., Plant Physiol 115: 569-576 (1997) |
| inducible | |
| Rd22 - Drought, salt | Yamaguchi-Shinozaki and Shinozaki, Mol Gen Genet |
| | 238: 17-25 (1993). |
| Cor15A - Cold, | Baker et al., Plant Mol. Biol. 24: 701-713 (1994). |
| dehydration, ABA | |
| GH3-Auxin inducible | Liu et al., Plant Cell 6: 645-657 (1994) |
| ARSK1 - Root, salt inducible | Hwang and Goodman, Plant J 8: 37-43 (1995). |
| PtxA-Root, salt inducible | GenBank accession X67427 |
| SbHRGP3 - Root specific | Ahn et al., Plant Cell 8: 1477-1490 (1998). |
| KST1 - Guard cell specific | Plesch et al., Plant Journal 28(4): 455-64(2001). |
| KAT1 - Guard cell specific | Plesch et al., Gene 249: 83-89 (2000) |
| | Nakamura et al., Plant Physiol. 109: 371-374 (1995) |
| salicylic acid inducible | PCT Application No. WO 95/19443 |
| tetracycline inducible | Gatz et al. Plant J. 2: 397-404 (1992) |
| Ethanol inducible | PCT Application No. WO 93/21310 |
| pathogen inducible PRP1 | Ward et al., 1993 Plant. Mol. Biol. 22: 361-366 |
| heat inducible hsp80 | U.S. Pat. No. 5,187,267 |
| cold inducible alpha- | PCT Application No. WO 96/12814 |
| amylase | |
| Wound-inducible pinII | European Patent No. 375091 |
| RD29A - salt-inducible | Yamaguchi-Shinozalei et al. (1993) Mol. Gen. Genet. |
| | 236: 331-100 |
| plastid-specific viral RNA- | PCT Application No. WO 95/16783 and. WO 97/06250 |
| polymerase | |

[0251] Selection marker systems, like the AHAS marker or other promotors, e.g. superpromotor (Ni et al., Plant Journal 7, 1995: 661-676), Ubiquitin promotor (Callis et al., J. Biol. Chem., 1990, 265: 12486-12493; U.S. Pat. No. 5,510,474; U.S. Pat. No. 6,020,190; Kawalleck et al., Plant. Molecular Biology, 1993, 21: 673-684) or 10S promotor (GenBank Accession numbers M59930 and X16673) may be similar useful for the combination with the present invention and are known to a person skilled in the art.

[0252] In particular, the present invention describes the use of comparing particular attributes or traits, estimating the general appearance or comparing the altered metabolic activity by inactivation or down-regulation of genes to engineer stress-tolerant and/or resistant, i.e. drought-, salt- and/or cold-tolerant and/or resistant plants. This strategy has herein been demonstrated for Arabidopsis thaliana, but its application is not restricted to these plants. Accordingly, the invention provides a transformed plant containing one or more (stress related protein encoding) genes selected from sequences of SEQ ID NO: (2n+1) for n=0 to 40 and for n=47 to 433 or homologs thereof, that are inactivated or down-regulated and stress tolerance and/or resistance, wherein the (environmental) stress is drought, increased salt or decreased or increased temperature but its application is not restricted to these adverse environments. Protection against other adverse conditions such as heat, air pollution, heavy metals and chemical toxicants, for example, may be obtained. In particularly preferred embodiments, the environmental stress is drought.

[0253] Growing the modified plants under stress conditions and then screening and analyzing the growth characteristics and/or metabolic activity assess the effect of the genetic modification in plants on stress tolerance and/or resistance. Such analysis techniques are well known to one skilled in the art. They include next to screening (Römpp Lexikon Biotechnologie, Stuttgart/New York: Georg Thieme Verlag 1992, “screening” p. 701) dry weight, wet weight, protein synthesis, carbohydrate synthesis, lipid synthesis, evapotranspiration rates, general plant and/or crop yield, flowering, reproduction, seed setting, root growth, respiration rates, photosynthesis rates, etc. (Applications of HPLC in Biochemistry in: Laboratory Techniques in Biochemistry and Molecular Biology, vol. 17; Rehm et al., 1993 Biotechnology, vol. 3, Chapter III: Product recovery and purification, page 469-714, VCH: Weinheim; Belter, P. A. et al., 1988 Bioseparations: downstream processing for biotechnology, John Wiley and Sons; Kennedy, J. F. and Cabral, J. M. S., 1992 Recovery processes for biological materials, John Wiley and Sons; Shaeiwitz, J. A. and Henry, J. D., 1988 Biochemical separations, in: Ulmann's Encyclopedia of Industrial Chemistry, vol. B3, Chapter 11, page 1-27, VCH: Weinheim; and Dechow, F. J. (1989) Separation and purification techniques in biotechnology, Noyes Publications).

[0254] The methods of the invention may be used to detect environmental stress in plant cells or plants by screening the plant cells for particular attributes or traits, estimating the general appearance, analyzing the growth characteristics or screening for altered metabolic activity as compared to non-stress conditions, which allows for selection of resistant or tolerant plants or plant cells and also provides detection of stress in plants or plant cells before symptoms are visible and damage is high.

[0255] The methods of the invention also allow breeding of plant cells or plants towards increased tolerance and/or resistance to environmental stress by screening the plant cells under stress conditions for particular attributes or traits, estimating the general appearance, analyzing the growth characteristics or screening for altered metabolic activity as compared to non-stress conditions and selecting those with increased tolerance and/or resistance to environmental stress for further replication.

[0256] The engineering of one or more stress related genes of the invention may also result in stress related proteins having altered activities which indirectly impact the stress response and/or stress tolerance of plants. For example, the normal biochemical processes of metabolism result in the production of a variety of products (e.g., hydrogen peroxide and other reactive oxygen species) which may actively interfere with these same metabolic processes (for example, peroxynitrite is known to react with tyrosine side chains, thereby inactivating some enzymes having tyrosine in the active site (Groves, J. T., 1999 Curr. Opin. Chem. Biol. 3(2):226-235). By optimizing the inactivation or down-regulation of one or more stress related genes of the invention, it may be possible to improve the metabolic activity leading to higher stress tolerance and/or resistance of the cell.

[0257] Additionally, the sequences disclosed herein, or fragments thereof, can be targeted to generate knockout mutations in the genomes of various other plant cells (Girke, T., 1998 The Plant Journal 15:39-48). The resultant knockout cells can then be evaluated for their ability or capacity to tolerate various stress conditions, their response to various stress conditions, and the effect on the phenotype and/or genotype of the mutation. For other methods of gene inactivation see U.S. Pat. No. 6,004,804 “Non-Chimeric Mutational Vectors” and Puttaraju et al., 1999 Spliceosome-mediated RNA trans-splicing as a tool for gene therapy Nature Biotechnology 17:246-252. Throughout this application, various publications are referenced. The disclosures of all of these publications and those references cited within those publications in their entireties are hereby incorporated by reference into this application in order to more fully describe the state of the art to which this invention pertains.

[0258] This invention is not limited to specific nucleic acids, specific polypeptides, specific cell types, specific host cells, specific conditions, or specific methods, etc., as such may, of course, vary, and the numerous modifications and variations therein will be apparent to those skilled in the art. It is also to be understood that the terminology used herein is for the purpose of describing specific embodiments only and is not intended to be limiting.

[0259] It should also be understood that the foregoing relates to preferred embodiments of the present invention and that numerous changes may be made therein without departing from the scope of the invention. The invention is further illustrated by the following examples, which are not to be construed in any way as imposing limitations upon the scope thereof. On the contrary, it is to be clearly understood that resort may be had to various other embodiments, modifications, and equivalents thereof, which, after reading the description herein, may suggest themselves to those skilled in the art without departing from the spirit of the present invention and/or the scope of the appended claims.

### EXAMPLE

### Engineering Stress-Tolerant Arabidopsis Plants by Inactivation or Down-Regulation Stress Related Genes

[0260] Transformation of Arabidopsis thaliana

[0261] Vector Preparation

[0262] A binary vector was constructed based on the modified pPZP binary vector backbone (comprising the kanamycin-gene for bacterial selection; Hajdukiewicz, P. et al., 1994, Plant Mol. Biol., 25: 989-994) and the selection marker bar-gene (De Block et al., 1987, EMBO J. 6, 2513-2518) driven by the mas2′1′ and mas271f promoters (Velten et al., 1984, EMBO J. 3, 2723-2730; Mengiste, Amedeo and Paszkowski, 1997, Plant J., 12, 945-948). The complete vector (FIG. 2) and plasmid are shown in the annex. Examples of other usable binary vectors for insertional mutagenesis are pBIN19, pBl101, pBinAR or pGPTV. An overview over binary vectors and their specific features is given in Hellens et al., 2000, Trends in plant Science, 5:446-451 and in Guerineau F., Mullineaux P., 1993, Plant transformation and expression vectors in plant molecular biology, LABFAX Series, (Croy R. R. D., ed.) pp. 121-127 Bios Scientific Publishers, Oxford.

[0263] Transformation of Agrobacteria

[0264] The plasmid was transformed into Agrobacterium tumefaciens (GV3101 pMP90; Koncz and Schell, 1986 Mol. Gen. Genet. 204:383-396) using heat shock or electroporation protocols. Transformed colonies were grown on YEB medium and selected by respective antibiotics (Rif/Gent/Km) for 2 d at 28° C. These agrobacteria cultures were used for the plant transformation.

[0265] Arabidopsis thaliana of the ecotype C24 were grown and transformed according to standard conditions (Bechtold, N., Ellis, J., Pelletier, G. 1993. In planta Agrobacterium mediated gene transfer by infiltration of Arabidopsis thaliana plants, C. R. Acad. Sci. Paris 316:1194-1199; Bent, A. F., Clough, J. C., 1998; Floral dip: a simplified method for Agrobacterium-mediated transformation of Arabidopsis thaliana, PLANT J. 16:735-743).

[0266] Transformed plants (F1) were selected by the use of their respective resistance marker. In case of BASTA®-resistance, plantlets were sprayed four times at an interval of 2 to 3 days with 0.02% BASTA® and transformed plants were allowed to set seeds. 50-100 seedlings (F2) were subjected again to marker selection, in case of BASTA-resistance by spaying with 0.1% BASTA® on 4 consecutive days during the plantlet phase. Plants segregating for a single resistance locus (approximately 3:1 resistant seedling to sensitive seedlings) were chosen for further analysis. From these lines three of the resistant seedlings (F2) were again allowed to set seeds and were tested for homozygosis through in-vitro germination of their seeds (F3) on agar medium containing the selection agent (BASTA®, 15 mg/L ammonium glufosinate, Pestanal, Riedel de Haen, Seeize, Germany). Those F2 lines which showed nearly 100% resistant offspring (F3) were considered homozygote and taken for functional analysis.

[0267] Measurement of Stress Tolerance

[0268] Transformed A. thaliana plants were grown individually in pots containing a 4:1 (v/v) mixture of soil and quartz sand in a growth chamber (York Industriekälte GmbH, Mannheim, Germany). To induce germination, sown seeds were kept at 4° C., in the dark, for 3 days. Standard growth conditions were: photoperiod of 16 h light and 8 h dark, 20° C., 60% relative humidity, and a photon flux density of 150 μE. Plants were watered daily until they were approximately 3 weeks old at which time drought was imposed by withholding water. Simultaneously, the relative humidity was reduced in 10% increments every second day to 20%. After approximately 12 days of withholding water, most plants showed visual symptoms of injury, such as wilting and leaf browning, whereas tolerant or resistant plants were identified as being visually turgid and healthy green in color. Plants were scored for symptoms of drought injury in comparison to wild type and neighboring plants for 3-5 days in succession. In one experiment (table 2), at least 4, but usually 20-25 replicates of each confirmed tolerant line, i.e. those that had been scored as tolerant or resistant in precoursery experiments, were grown and treated as before. In this experiment the average and maximum number of days of drought survival after the wild-type control had visually died was determined. Additionally measurements of chlorophyll fluorescence (table 3) were made in stressed and non-stressed plants using a Mini-PAM (Heinz Walz GmbH, Effeltrich, Germany).

[0269] In the drought tolerance experiment (table 2) the control (non-transformed Arabidopsis thaliana) and most transformed lines in the test showed extreme visual symptoms of stress including necrosis and cell death. Several transformed plants retained viability as shown by their turgid appearance and maintenance of green color. Chlorophyll fluorescence measurements of photosynthetic yield (in non-dark adapted plants) confirmed that 14 days of drought stress completely inhibited photosynthesis in the control plants. In most cases the transformed lines maintained photosynthetic function longer (table 3).

[0270] Analysis of the Selected Stress Resistant Lines

[0271] Since the lines were preselected for single insertion loci and a homozygous situation of the resistance marker, the disruption (or mutation) of single genes through the integration of the T-DNA were expected to have lead to the stress-resistant phenotype. Lines which showed a consistent phenotype were chosen for molecular analysis.

[0272] Genomic DNA was purified from approximately 100 mg of leaf tissue from these lines using standard procedures (either spins columns from Qiagen, Hilden, Germany or the Nucleon Phytopure Kit from Amersham Biosciences, Freiburg, Germany). The amplification of the insertion side of the T-DNA was achieved using two different methods. Either by an adaptor PCR-method according to Spertini D, Béliveau C. and Bellemare G., 1999, Biotechniques, 27, 308-314 using T-DNA specific primers LB1 (5′-TGA CGC CAT TTC GCC TTT TCA-3′; SEQ ID NO: 83) for the first and LB2 (5′-CAG AAA TGG ATA AAT AGC CTT GCT TCC-3′; SEQ ID NO: 84) or RB4-2 (5′-AGC TGG CGT AAT AGC GAA GAG-3′; SEQ ID NO: 85) for the second round of PCR. Alternatively TAIL-PCR (Liu Y-G, Mitsukawa N, Oosumi T and Whittier R F, 1995, Plant J. 8, 457-463 was preformed. In this case in the first round PCR LB1 (5′-TGA CGC CAT TTC GCC TTT TCA-3′ SEQ ID NO: 83) or RB1-2 (5′-CAA CTT AAT CGC CTT GCA GCA CA-3′; SEQ ID NO: 86), for the second round LB2 (5′-CAG AAA TGG ATA AAT AGC CTT GCT TCC-3′ SEQ ID NO: 84) or RB4-2 (5′-AGC TGG CGT AAT AGC GAA GAG-3′ SEQ ID NO: 87) and in the last round LB3 (5′-CCA ATA CAT TAC ACT AGC ATC TG-3′; SEQ ID NO: 88) or RB5 (5′-AAT GCT AGA GCA GCT TGA-3′; SEQ ID NO: 89) were used as T-DNA specific primers for left or right T-DNA borders respectively.

[0273] Appropriate PCR-products were identified on agarose gels and purified using columns and standard procedures (Qiagen, Hilden, Germany). PCR-products were sequenced with additional T-DNA-specific primers located towards the borders relative to the primers used for amplification. For PCR products containing left border sequences primer LBseq (5′-CAA TAC ATT ACA CTA GCA TCT G-3′; SEQ ID NO: 90) and for sequences containing right border sequences primer RBseq (5′-AGA GGC CCG CAC CGA TCG-3′; SEQ ID NO: 91) was used for sequencing reactions. The resulting sequences were taken for comparison with the available Arabidopsis genome sequence from Genbank using the blast algorithm (Altschul et al., 1990. J Mol Biol, 215:403-410).

[0274] Details on PCR products used to identify the genomic locus are given in table 4. Indicated are the identified annotated open reading frame in the Arabidopsis genome, the estimated size of the obtained PCR product (in base pairs), the T-DNA border (LB: left border, RB: right border) for which the amplification was achieved, the method which resulted in the indicated PCR product (explanation see text above), the respective restriction enzymes in case of adaptor PCR, and the degenerated primer in the case of TAIL PCR. Routinely degenerated primers ADP3 (5′-WGTGNAGWANCANAGA-3′; SEQ ID NO: 92), ADP6 (5′-AGWGNAGWANCANAGA-3′; SEQ ID NO: 93) and ADP8 (5′-NTGCGASWGANWAGAA-3′; SEQ ID NO: 94) were used next to the other known primers given in table 4.

[0275] The identification of the insertion locus in each case was confirmed by a control PCR, using a T-DNA-specific primer and a primer deduced from the identified genomic locus, near to the insertion side. The amplification of a PCR-product of the expected size from the insertion line using these two primers proved the disruption of the identified locus by the T-DNA integration.

[0276] Tables 2-5:

TABLE 2
Duration of survival of transformed Arabidopsis thaliana after
imposition of drought stress on 3-week-old plants. Drought tolerance
was measured visually at daily intervals. Survival duration is the
average of all plants that survived longer than the wild type control.
The Maximum duration is the longest period that any single transformed
plant survived longer than the wild type control.

| SEQ ID | | Plants | Average days of | Maximum days of |
|---|---|---|---|---|
| No. | Gene | tested | survival after WT | survival |
| | CONTROL | | 0 | 0 |
| 1 | At1g10410 | 15 | 2.0 | 3 |
| 3 | At1g10420 | 15 | 2.0 | 3 |
| 5 | At1g22400 | 24 | 0.8 | 3 |
| 7 | At1g22410 | 24 | 0.8 | 3 |
| 9 | At1g26230 | 14 | 1 | 3 |
| 11 | At1g26240 | 14 | 1 | 3 |
| 13 | At1g64625 | 24 | 2.33 | 6 |
| 15 | At1g77730 | 25 | 1.04 | 3 |
| 17 | At1g77740 | 25 | 1.04 | 3 |
| 19 | At1g78060 | 25 | 1.2 | 3 |
| 21 | At2g30770 | 25 | 1.28 | 2 |
| 23 | At2g30780 | 25 | 1.28 | 2 |
| 25 | At2g44580 | 22 | 0.92 | 4 |
| 27 | At2g44800 | 24 | 1.14 | 4 |
| 29 | At2g44810 | 24 | 1.14 | 4 |
| 31 | At3g06280 | 24 | 0.83 | 4 |
| 33 | At3g06290 | 24 | 0.83 | 4 |
| 35 | At3g08970 | 24 | 1.21 | 4 |
| 37 | At3g08980 | 24 | 1.21 | 4 |
| 39 | At3g13000 | 23 | 0.7 | 4 |
| 41 | At3g14820 | 24 | 0.88 | 3 |
| 43 | At3g14830 | 24 | 0.88 | 3 |
| 45 | At3g46900 | 19 | 1.84 | 3 |
| 47 | At3g46910 | 19 | 1.84 | 3 |
| 49 | At3g54360 | 40 | 7.03 | 20 |
| 51 | At3g54370 | 40 | 7.03 | 20 |
| 53 | At3g55990 | 40 | 7.03 | 20 |
| 55 | At3g60570 | 21 | 1.76 | 4 |
| 57 | At3g60580 | 21 | 1.76 | 4 |
| 59 | At3g60680 | 24 | 1.08 | 4 |
| 61 | At3g60690 | 24 | 1.08 | 4 |
| 63 | At4g00890 | 4 | 2.25 | 3 |
| 65 | At4g00900 | 4 | 2.25 | 3 |
| 67 | At4g25340 | 24 | 0.42 | 1 |
| 69 | At5g01750 | 24 | 2.33 | 6 |
| 71 | At5g09620 | 24 | 1.25 | 5 |
| 73 | At5g09630 | 25 | 2.6 | 9 |
| 75 | At5g25240 | 23 | 1.52 | 3 |
| 77 | At5g25250 | 23 | 1.2 | 3 |
| 79 | At5g55280 | 24 | 0.8 | 3 |
| 81 | At5g66190 | 21 | 0.81 | 3 |

TABLE 3
Photosynthetic yield as determined by chlorophyll florescence of transformed
Arabidopsis thaliana after imposition of drought stress on 3-week-old plants.
Measurements were taken at intervals after withholding water and reported as
photosynthetic yield (Y). Values are the average of 5 randomly selected plants. These
are compared to the MC24 strain for reference.

| | | Photosynthetic | | Photosynthetic | | Photosynthetic | |
|---|---|---|---|---|---|---|---|
| | | yield | | yield | | yield | |
| | | 6 days | | 10 days | | 14 days | |
| SEQ | | after final | MC24 | after final | MC24 | after final | MC24 |
| ID No. | Gene | watering | Reference | watering | Reference | watering | Reference |
| 5 | At1g22400 | | | 751 | 623 | 401 | 100 |
| 7 | At1g22410 | | | 751 | 623 | 401 | 100 |
| 9 | At1g26230 | 760 | 623 | 80 | 100 | | |
| 11 | At1g26240 | 760 | 623 | 80 | 100 | | |
| 13 | At1g64625 | 672 | 610 | 138 | 16 | | |
| 15 | At1g77730 | 779 | 783 | 425 | 211 | | |
| 17 | At1g77740 | 779 | 783 | 425 | 211 | | |
| 19 | At1g78060 | 784 | 783 | 0 | 211 | | |
| 21 | At2g30770 | 784 | 783 | 643 | 211 | | |
| 23 | At2g30780 | 784 | 783 | 643 | 211 | | |
| 25 | At2g44580 | 778 | 623 | 579 | 100 | | |
| 27 | At2g44800 | 750 | 623 | 249 | 100 | | |
| 29 | At2g44810 | 750 | 623 | 249 | 100 | | |
| 31 | At3g06280 | 704 | 623 | 55 | 100 | | |
| 33 | At3g06290 | 704 | 623 | 55 | 100 | | |
| 35 | At3g08970 | 776 | 623 | 573 | 100 | | |
| 37 | At3g08980 | 776 | 623 | 573 | 100 | | |
| 39 | At3g13000 | 753 | 623 | 152 | 100 | | |
| 41 | At3g14820 | 683 | 623 | 174 | 100 | | |
| 43 | At3g14830 | 683 | 623 | 174 | 100 | | |
| 45 | At3g46900 | 757 | 783 | 751 | 211 | 84 | 0 |
| 47 | At3g46910 | 757 | 783 | 751 | 211 | 84 | 0 |
| 49 | At3g54360 | 774 | 794 | 776 | 413 | 747 | 54 |
| 51 | At3g54370 | 774 | 794 | 776 | 413 | 747 | 54 |
| 53 | At3g55990 | 774 | 794 | 776 | 413 | 747 | 54 |
| 55 | At3g60570 | 757 | 623 | 569 | 100 | | |
| 57 | At3g60580 | 757 | 623 | 569 | 100 | | |
| 59 | At3g60680 | 767 | 623 | 358 | 100 | | |
| 61 | At3g60690 | 767 | 623 | 358 | 100 | | |
| 63 | At4g00890 | 762 | 623 | 354 | 100 | | |
| 65 | At4g00900 | 762 | 623 | 354 | 100 | | |
| 67 | At4g25340 | 767 | 783 | 190 | 211 | | |
| 69 | At5g01750 | 672 | 610 | 138 | 16 | | |
| 71 | At5g09620 | 759 | 757 | 639 | 610 | 148 | 107 |
| 73 | At5g09630 | 722 | 750 | 761 | 576 | 369 | 31 |
| 75 | At5g25240 | 683 | 783 | 774 | 211 | | |
| 77 | At5g25250 | 774 | 783 | 683 | 211 | | |
| 79 | At5g55280 | | | 751 | 623 | 401 | 100 |
| 81 | At5g66190 | 777 | 783 | 367 | 211 | | |

TABLE 4
Details on PCR products used to identify the down-regulated genomic locus.

| | | Length | | | | |
|---|---|---|---|---|---|---|
| SEQ | | PCR | Sequence | | | Restriction enzyme or |
| ID No. | Gene | Product | length | Border | Method | deg. Primer |
| 1 | At1g10410 | 1700 | 194 | LB | Adaptor | Spe I |
| 3 | At1g10420 | 1700 | 194 | LB | Adaptor | Spe I |
| 5 | At1g22400 | 2000 | 695 | LB | Adaptor | Mun I |
| 7 | At1g22410 | 2000 | 695 | LB | Adaptor | Mun I |
| 9 | At1g26230 | 550 | 441 | LB | Adaptor | Mun I |
| 11 | At1g26240 | 550 | 441 | LB | Adaptor | Mun I |
| 13 | At1g64625 | 900 | 717 | RB | Adaptor | Psp1406 I/Bsp119 I |
| 15 | At1g77730 | 700 | 596 | RB | TAIL | ADP3 |
| 17 | At1g77740 | 700 | 596 | RB | TAIL | ADP3 |
| 19 | At1g78060 | 2000 | 647 | RB | Adaptor | Mun I |
| 21 | At2g30770 | 2000 | 630 | RB | Adaptor | Spe I |
| 23 | At2g30780 | 2000 | 630 | RB | Adaptor | Spe I |
| 25 | At2g44580 | 1000 | 564 | LB | Adaptor | BglII |
| 27 | At2g44800 | 1400 | 663 | LB | Adaptor | BglII |
| 29 | At2g44810 | 1400 | 663 | LB | Adaptor | BglII |
| 31 | At3g06280 | 1500 | 604 | LB | Adaptor | BglII |
| 33 | At3g06290 | 1500 | 604 | LB | Adaptor | BglII |
| 35 | At3g08970 | 900 | 473 | RB | Adaptor | Mun I |
| 37 | At3g08980 | 900 | 473 | RB | Adaptor | Mun I |
| 39 | At3g13000 | 450 | 273 | LB | Adaptor | Spe I |
| 41 | At3g14820 | 1200 | 556 | LB | Adaptor | BglII |
| 43 | At3g14830 | 1200 | 556 | LB | Adaptor | BglII |
| 45 | At3g46900 | 750 | 503 | LB | TAIL | ADP8 |
| 47 | At3g46910 | 750 | 503 | LB | TAIL | ADP8 |
| 49 | At3g54360 | 1300 | 579 | LB | Adaptor | Psp1406 I/Bsp119 I |
| 51 | At3g54370 | 1300 | 579 | LB | Adaptor | Psp1406 I/Bsp119 I |
| 53 | At3g55990 | 1300 | 579 | LB | Adaptor | Psp1406 I/Bsp119 I |
| 55 | At3g60570 | 850 | 499 | LB | Adaptor | Psp1406 I/Bsp 119 I |
| 57 | At3g60580 | 850 | 499 | LB | Adaptor | Psp1406 I/Bsp119 I |
| 59 | At3g60680 | 2000 | 577 | LB | Adaptor | Spe I |
| 61 | At3g60690 | 2000 | 577 | LB | Adaptor | Spe I |
| 63 | At4g00890 | 850 | 624 | LB | Adaptor | Psp1406 I/Bsp119 I |
| 65 | At4g00900 | 850 | 624 | LB | Adaptor | Psp1406 I/Bsp119 I |
| 67 | At4g25340 | 600 | 439 | LB | TAIL | ADP3 |
| 69 | At5g01750 | 1400 | 699 | LB | Adaptor | Mun I |
| 71 | At5g09620 | 800 | 562 | LB | Adaptor | Spe I |
| 73 | At5g09630 | 800 | 562 | LB | Adaptor | Spe I |
| 75 | At5g25240 | 350 | 285 | LB | Adaptor | Psp1406 I/Bsp119 I |
| 77 | At5g25250 | 350 | 285 | LB | Adaptor | Psp1406 I/Bsp119 I |
| 79 | At5g55280 | 1100 | 622 | LB | Adaptor | Psp1406 I/Bsp119 I |
| 81 | At5g66190 | 900 | 483 | RB | Adaptor | Spe I |

[0277] Construction of antisense constructs for repression of the genes of the invention Fragments of SEQ ID NO: 95 or other nucleic acids of the invention are amplified by PCR using pairs of gene specific primers. To enable cloning of the PCR product, restriction sites may be added to the primers used for the amplification. Alternatively recombination sites may be added to the primers to enable a recombination reaction. The PCR fragment is either cloned or recombined into a binary vector, preferentially under control of a strong constitutive, tissue or developmental specific promoters in a way, that the orientation to the promoter is opposite of the direction the genus has in its original genomic position.

[0278] The amplification of the fragment of the SEQ ID NO: 95 was performed using the oligonucleotides that have been deduced from the gene sequence:

Seq1antifw:

(SEQ ID NO: 869)

5′-atagaattcatgcttcgactgatcgacga-3′
Seq1antirev:

(SEQ ID NO: 870)

5′-atagtcgaccaccgggcacattgagcaat-3′

[0279] The Oligonucleotides have been solved in water to give a concentration of 20 μM. The standard protocol of RNA extraction (Qiagen) and cDNA production (Invitrogen) is used for the isolation procedure of RNA from different tissues of Brassica napus, Glycine max, Zea mays or Oryza sativa and synthesis of there respective cDNA. The PCR reaction contained 5 μl ThermalAce buffer (Invitrogen), 0.4 μl dNTPs (25 mM each) (Invitrogen), 0.5 μl Primer Seq1antifw, 0.5 μl Primer Seq1antirev, 0.5 μl ThermalAce (Invitrogen), 0.5 μl cDNA and 42.6 μl water. The PCR was performed on MJ-Cycler Tetrad (BioZym) with the following program:

4 min 94° C., followed by 30 cycles of 1 min 94° C., 1 min 57° C., 1 min 72° C. followed by 10 min 72° C. and cooling to 25° C.

[0280] The PCR product has been purified using a Kit from Qiagen. The DNA was subsequently digested with EcoRI/SalI (NEB) at 37° C. over night. The fragment was then cloned into the vector BaseVector Corn (see FIG. 1) which has been digested with EcoRI/SalI. The resulting construct was named BaseVector Corn-antiSeq1.

[0281] From this vector the cassette comprising the ScBV Promoter, the antisense fragment of Seq1 and the NOS terminator has been cut out using the restriction enzymes AscI/PacI and has been ligated in the vector TrafoVector Corn (see FIG. 2) yielding the vector TrafoVector Corn_antiSeq1 (FIG. 3).

[0282] Construction of RNAi Constructs for Repression of the Genes of the Invention

[0283] Two fragments of SEQ ID NO: 95 are amplified by PCR. To enable cloning of the PCR product, restriction sites may be added to the primers used for the ampli-fication. Alternatively recombination sites may be added to the primers to enable a recombination reaction. The PCR fragment is either cloned or recombined into a binary vector, preferentially under control of a strong constitutive, tissue or developmental specific promoters in a way, that the fragment is introduced twice in the vector as an inverted repeat, the repeats separated by a DNA spacer.

[0284] The amplification of the fragments of the SEQ ID NO: 95 was performed using the oligonucleotides that have been deduced from the gene sequence:

Seq1rifw1:

(SEQ ID NO: 871)

5′-atagtcgacatgcttcgactgatcgacga-3′
Seq1rirev1:

(SEQ ID NO: 872)

5′-atagaattccaccgggcacattgagcaat-3′
Seq1rifw2:

(SEQ ID NO: 873)

5′-atacccgggatgcttcgactgatcgacga-3′
Seq1rirev2:

(SEQ ID NO: 874)

5′-atatctagacaccgggcacattgagcaat-3′

[0285] The Oligonucleotides have been solved in water to give a concentration of 20 μM. The PCR reactions contained 5 μl ThermalAce buffer (Invitrogen), 0.4 μl dNTPs (25 mM each) (Invitrogen), 0.5 μl Primer Seq1rifwl, 0.5 μl Primer Seq1rirev1, 0.5 μl ThermalAce (Invitrogen), 0.5 μl cDNA and 42.6 μl water and 5 μl ThermalAce buffer (Invitrogen), 0.4 μl dNTPs (25 mM each) (Invitrogen), 0.5 μl Primer Seq1rifw2, 0.5 μl Primer Seq1rirev2, 0.5 μl ThermalAce (Invitrogen), 0.5 μl cDNA and 42.6 μl water respectively. The PCRs were performed on MJ-Cycler Tetrad (BioZym) with the following programm:

4 min 94° C., followed by 30 cycles of 1 min 94° C., 1 min 57° C., 1 min 72° C. followed by 10 min 72° C. and cooling to 25° C.

[0286] The PCR products have been purified using a Kit from Qiagen. The DNA was subsequently digested with SalI/EcoRI at 37° C. over night and SmaI for 6 h at 28° C. followed by digestion with XbaI overnight at 37° C. respectively. The SmaI/XbaI digested fragment was then cloned into the vector BaseVector Corn-Spacer (see FIG. 4) which has been digested with SmaI/XbaI. The resulting construct was digested with EcoRI/SalI and the EcoRI/SalI PCR fragment was ligated into this vector. Subsequently, the expression cassette comprising the ScBV promoter, inverted repeat of Seq1 separated by the spacer sequence and NOS terminator has been cut out using the restriction enzymes AscI/PacI and has been ligated in the vector TrafoVector Corn (see FIG. 2) yielding the vector.

[0287] Construction of Cosuppression Constructs for Repression of the Genes of the Invention

[0288] A fragment of SEQ ID NO: 95 is amplified by PCR. To enable cloning of the PCR product, restriction sites may be added to the primers used for the amplification. Alternatively recombinationsites may be added to the primers to enable a recombination reaction. The PCR fragment is either cloned or recombined into a binary vector, preferentially under control of a strong constitutive, tissue or developmental specific promoters in a way, that the orientation to the promoter is identical to the direction the gen has in its original genomic position.

[0289] The amplification of the fragment of the SEQ ID NO: 95 was performed using the oligonucleotides that have been deduced from the gene sequence:

Seq1cofw:

(SEQ ID NO: 875)

5′-atagtcgacatgcttcgactgatcgacga-3′
Seq1corev:

(SEQ ID NO: 876)

5′-atagaattcccaccgggcacattgagcaat-3′

[0290] The Oligonucleotides have been solved in water to give a concentration of 20 μM. The PCR reactions contained 5 μl ThermalAce buffer (Invitrogen), 0.4 μl dNTPs (25 mM each) (Invitrogen), 0.5 μl Primer Seq1cofw, 0.5 μl Primer Seq1corev, 0.5 μl ThermalAce (Invitrogen), 0.5 μl cDNA and 42.6 μl water. The PCR was performed on MJ-Cycler Tetrad (BioZym) with the following program:

4 min 94° C., followed by 30 cycles of 1 min 94° C., 1 min 57° C., 1 min 72° C. followed by 10 min 72° C. and cooling to 25° C.

[0291] The PCR product has been purified using a Kit from Qiagen. The DNA was subsequently digested with EcoRI/SalI (NEB) at 37° C. over night. The fragment was then cloned into the vector BaseVector Corn (see FIG. 1) which has been digested with EcoRI/SalI. The resulting construct was named BaseVector Corn_coSeq1. From this vector the cassette comprising the ScBV Promoter, the cosuppression fragment of Seq1 and the NOS terminator has been cut out using the restriction enzymes Asci/PacI and has been ligated in the vector TrafoVector Corn (see FIG. 2) yielding the vector TrafoVector Corn_coSeq 1 (FIG. 5).

[0292] Engineering Stress-Tolerant Corn Plants by Reducing the Expression of Stress Related Genes from Zea mays in Corn.

[0293] Transformation of corn (Zea mays L.) is performed with a modification of the method described by Ishida et al. (1996. Nature Biotech 14745-50). Transformation is genotype-dependent in corn and only specific genotypes are amenable to transformation and regeneration. The inbred line A188 (University of Minnesota) or hybrids with A188 as a parent are good sources of donor material for transformation (Fromm et al. 1990 Biotech 8:833-839), but other genotypes can be used successfully as well. Ears are harvested from corn plants at approximately 11 days after pollination (DAP) when the length of immature embryos is about 1 to 1.2 mm. Immature embryos are co-cultivated with Agrobacterium tumefaciens that carry “super binary” vectors and transgenic plants are recovered through organogenesis. The super binary vector system of Japan Tobacco is described in WO patents WO94/00977 and WO95/06722. Vectors are constructed as described. Various selection marker genes can be used including the corn gene encoding a mutated acetohydroxy acid synthase (AHAS) enzyme (U.S. Pat. No. 6,025,541). Similarly, various promoters can be used to provide constitutive, developmental, tissue or environmental regulation of gene suppression construct, eg the cosuppresion or the antisense or the RNAi construct. In this example, the 34S promoter (GenBank Accession numbers M59930 and X16673) is used to provide constitutive expression of the cosuppression or antisense or RNAi constructs. Excised embryos are grown on callus induction medium, then corn regeneration medium, containing imidazolinone as a selection agent. The Petri plates were incubated in the light at 25° C. for 2-3 weeks, or until shoots develop. The green shoots from each embryo are transferred to corn rooting medium and incubated at 25° C. for 2-3 weeks, until roots develop. The rooted shoots are transplanted to soil in the greenhouse. T1 seeds are produced from plants that exhibit tolerance to the imidazolinone herbicides and are PCR positive for the transgenes.

[0294] The T1 transgenic plants are then evaluated for their improved stress tolerance according to the standard methods eg the withdraw of water and the performance other the plant in comparison the wildtype or mock transformed plants. The seedlings receive no water for a period up to 3 weeks at which time the plant and soil are desiccated. At various times after withholding water, a normal watering schedule is resumed. At one week after resuming watering, the lengths of leaf blades, and the fresh and dry weights of the shoots is determined. At an equivalent degree of drought stress, tolerant plants are able to resume normal growth whereas susceptible plants have died or suffer significant injury resulting in shorter leaves and less dry matter. The T1 generation of single locus insertions of the T-DNA will segregate for the transgene in a 1:2:1 ratio. Those progeny containing one or two copies of the transgene (¾ of the progeny) are tolerant of the imidazolinone herbicide, and exhibit greater tolerance of drought stress than those progeny lacking the transgenes. Tolerant plants have higher seed yields, maintained their stomatal aperture and showed only slight changes in osmotic potential and proline levels, whereas the susceptible non-transgenic control plants closed their stomata and exhibited increased osmotic potential and proline levels. Homozygous T2 plants exhibited similar phenotypes. Hybrid plants (F1 progeny) of homozygous transgenic plants and non-transgenic plants also exhibited increased environmental stress tolerance.

[0295] Engineering Stress-Tolerant Soybean Plants by Reducing the Expression of Stress Related Genes from Glycine max in Glycine max.

[0296] In order to reduce the expression of the stress related soybean gene ins Soybean, antisense, cosuppression or RNAi constructs are constructed in a way similar to what has been described in the previous examples. Soybean is transformed according to the following modification of the method described in the Texas A&M patent U.S. Pat. No. 5,164,310. Several commercial soybean varieties are amenable to transformation by this method. The cultivar Jack (available from the Illinois Seed Foundation) is a commonly used for transformation. Seeds are sterilized by immersion in 70% (v/v) ethanol for 6 min and in 25% commercial bleach (NaOCl) supplemented with 0.1% (v/v) Tween for 20 min, followed by rinsing 4 times with sterile double distilled water. Seven-day old seedlings are propagated by removing the radicle, hypocotyl and one cotyledon from each seedling. Then, the epicotyl with one cotyledon is transferred to fresh germination media in petri dishes and incubated at 25° C. under a 16-hr photoperiod (approx. 100 μE-m-2s-1) for three weeks. Axillary nodes (approx. 4 mm in length) are cut from 3-4 week-old plants. Axillary nodes are excised and incubated in Agrobacterium LBA4404 culture.

[0297] Many different binary vector systems have been described for plant transformation (e.g. An, G. in Agrobacterium Protocols. Methods in Molecular Biology vol 44, pp 47-62, Gartland K M A and M R Davey eds. Humana Press, Totowa, N.J.) and can be used to carry the antisense, cosuppression or RNAi constructs. Many are based on the vector pBIN19 described by Bevan (Nucleic Acid Research. 1984.12:8711-8721) that includes a plant gene expression cassette flanked by the left and right border sequences from the Ti plasmid of Agrobacterium tumefaciens. A plant gene expression cassette consists of at least two components—a selection marker gene with a suitable promoter and a plant promoter regulating the transcription of the cDNA or the antisense fragment or the RNAi construct. Various selection marker genes can be used including the Arabidopsis gene encoding a mutated acetohydroxy acid synthase (AHAS) enzyme (U.S. Pat. Nos. 57,673,666 and 6,225,105). Similarly, various promoters can be used to regulate the cosuppression, RNAi order antisense construct to provide constitutive, developmental, tissue or environmental regulation. In this example, the 34S promoter (GenBank Accession numbers M59930 and X16673) is used to provide constitutive expression the gene repression constructs.

[0298] After the co-cultivation treatment, the explants are washed and transferred to selection media supplemented with 500 mg/L timentin. Shoots are excised and placed on a shoot elongation medium. Shoots longer than 1 cm are placed on rooting medium for two to four weeks prior to transplanting to soil.

[0299] The primary transgenic plants (T0) are analyzed by PCR to confirm the presence of T-DNA. These results are confirmed by Southern hybridization in which DNA is electrophoresed on a 1% agarose gel and transferred to a positively charged nylon membrane (Roche Diagnostics). The PCR DIG Probe Synthesis Kit (Roche Diagnostics) is used to prepare a digoxigenin-labelled probe by PCR, and used as recommended by the manufacturer.

[0300] The transgenic plants are then evaluated for their improved stress tolerance according to the method standard methods, or like described in the following. The seedlings receive no water for a period up to 3 weeks at which time the plant and soil are desiccated. At various times after withholding water, a normal watering schedule is resumed. At one week after resuming watering, the lengths of leaf blades, and the fresh and dry weights of the shoots is determined. At an equivalent degree of drought stress, tolerant plants are able to resume normal growth whereas susceptible plants have died or suffer significant injury resulting in shorter leaves and less dry matter.

[0301] Stress-tolerant soybean plants reduced in the expression of the stress related genes from soybean have higher seed yields, maintain their stomatal aperture and show only slight changes in osmotic potential and proline levels, whereas the susceptible non-transgenic control plants close their stomata and exhibit increased osmotic potential and proline levels.

[0302] Transgenic plants that displaytolerance to salinity or cold have higher seed yields, photosynthesis and dry matter production than susceptible plants.

[0303] Engineering stress-tolerant Rapeseed/Canola plants by reducing the expression of stress related genes from Brassica napus, in Brassica napus. Cotyledonary petioles and hypocotyls of 5-6 day-old young seedlings are used as explants for tissue culture and transformed according to Babic et al. (1998, Plant Cell Rep 17: 183-188). The commercial cultivar Westar (Agriculture Canada) is the standard variety used for transformation, but other varieties can be used. Agrobacterium tumefaciens LBA4404 containing a binary vector carrying an antisense or an cosuppression or an RNAi constructs as described in the examples above is used for canola transformation. Many different binary vector systems have been described for plant transformation (e.g. An, G. in Agrobacterium Protocols. Methods in Molecular Biology vol 44, pp 47-62, Gartland K M A and M R Davey eds. Humana Press, Totowa, N.J.). Many are based on the vector pBIN19 described by Bevan (Nucleic Acid Research. 1984.12:8711-8721) that includes a plant gene expression cassette flanked by the left and right border sequences from the Ti plasmid of Agrobacterium tumefaciens. A plant gene expression cassette consists of at least two components—a selection marker gene with a suitable promoter and a plant promoter regulating the transcription of the cDNA or a fragment of it for cosupression or the antisense fragment or the RNAi construct. Various selection marker genes can be used including the Arabidopsis gene encoding a mutated acetohydroxy acid synthase (AHAS) enzyme (U.S. Pat. Nos. 57,673,666 and 6,225,105). Similarly, various promoters can be used to regulate the constructs for reducing gene expression to provide constitutive, developmental, tissue or environmental regulation of transcription. In this example, the 34S promoter (GenBank Accession numbers M59930 and X16673) is used to provide constitutive expression of the gene repression constructs.

[0304] Canola seeds are surface-sterilized in 70% ethanol for 2 min., and then in 30% Clorox with a drop of Tween-20 for 10 min, followed by three rinses with sterilized distilled water. Seeds are then germinated in vitro 5 days on half strength MS medium without hormones, 1% sucrose, 0.7% Phytagar at 23° C., 16 hr. light. The cotyledon petiole explants with the cotyledon attached are excised from the in vitro seedlings, and inoculated with Agrobacterium by dipping the cut end of the petiole explant into the bacterial suspension. The explants are then cultured for 2 days on MSBAP-3 medium containing 3 mg/l BAP, 3% sucrose, 0.7% Phytagar at 23° C., 16 hr light. After two days of co-cultivation with Agrobacterium, the petiole explants are transferred to MSBAP-3 medium containing 3 mg/l BAP, cefotaxime, carbenicillin, or timentin (300 mg/l) for 7 days, and then cultured on MSBAP-3 medium with cefotaxime, carbenicillin, or timentin and selection agent until shoot regeneration. When the shoots are 5-10 mm in length, they are cut and transferred to shoot elongation medium (MSBAP-0.5, containing 0.5 mg/l BAP). Shoots of about 2 cm in length are transferred to the rooting medium (MS0) for root induction.

[0305] Samples of the primary transgenic plants (T0) are analyzed by PCR to confirm the presence of T-DNA. These results are confirmed by Southern hybridization in which DNA is electrophoresed on a 1% agarose gel and transferred to a positively charged nylon membrane (Roche Diagnostics). The PCR DIG Probe Synthesis Kit (Roche Diagnostics) is used to prepare a digoxigenin-labelled probe by PCR, and used as recommended by the manufacturer.

[0306] The transgenic plants are then evaluated for their improved stress tolerance according to the method standard methods, or like described in the following. The seedlings receive no water for a period up to 3 weeks at which time the plant and soil are desiccated. At various times after withholding water, a normal watering schedule is resumed. At one week after resuming watering, the lengths of leaf blades, and the fresh and dry weights of the shoots is determined. At an equivalent degree of drought stress, tolerant plants are able to resume normal growth whereas susceptible plants have died or suffer significant injury resulting in shorter leaves and less dry matter. It is found that transgenic Rapeseed/Canola reduced in the expression of stress related genes from Brassica napus, are more tolerant to environmental stress than non-transgenic control plants. Tolerant plants have higher seed yields, maintain their stomatal aperture and show only slight changes in osmotic potential and proline levels, whereas the susceptible non-transgenic control plants close their stomata and exhibited increased osmotic potential and proline levels. Plants that have tolerance to salinity or cold have higher seed yields, photosynthesis and dry matter production than susceptible plants.

[0307] Identification of Identical and Heterologous Genes

[0308] Gene sequences can be used to identify identical or heterologous genes from cDNA or genomic libraries. Identical genes (e.g. full-length cDNA clones) can be isolated via nucleic acid hybridization using for example cDNA libraries. Depending on the abundance of the gene of interest, 100,000 up to 1,000,000 recombinant bacteriophages are plated and transferred to nylon membranes. After denaturation with alkali, DNA is immobilized on the membrane by e.g. UV cross linking. Hybridization is carried out at high stringency conditions. In aqueous solution, hybridization and washing is performed at an ionic strength of 1 M NaCl and a temperature of 68° C. Hybridization probes are generated by e.g. radioactive (³²P) nick transcription labeling (High Prime, Roche, Mannheim, Germany). Signals are detected by autoradiography.

[0309] Partially identical or heterologous genes that are similar but not identical can be identified in a manner analogous to the above-described procedure using low stringency hybridization and washing conditions. For aqueous hybridization, the ionic strength is normally kept at 1 M NaCl while the temperature is progressively loared from 68 to 42° C.

[0310] Isolation of gene sequences with homology (or sequence identity/similarity) in only a distinct domain of for example 10-20 amino acids can be carried out using synthetic radio labeled oligonucleotide probes. Radiolabeled oligonucleotides are prepared by phosphorylation of the 5-prime end of two complementary oligonucleotides with T4 polynucleotide kinase. The complementary oligonucleotides are annealed and ligated to form concatemers. The double stranded concatemers are then radiolabeled by, for example, nick transcription. Hybridization is normally performed at low stringency conditions using high oligonucleotide concentrations.

[0311] Oligonucleotide hybridization solution:

### 6×SSC

[0312] 0.01 M sodium phosphate

### 1 mM EDTA (pH 8)

### 0.5% SDS

[0313] 100 μg/ml denatured salmon sperm DNA
0.1% nonfat dried milk

[0314] During hybridization, temperature is lowered stepwise to 5-10° C. below the estimated oligonucleotide Tₘ or down to room temperature followed by washing steps and autoradiography. Washing is performed with low stringency such as 3 washing steps using 4×SSC. Further details are described by Sambrook, J. et al., 1989, “Molecular Cloning: A Laboratory Manual,” Cold Spring Harbor Laboratory Press or Ausubel, F. M. et al., 1994, “Current Protocols in Molecular Biology,” John Wiley & Sons.

[0315] Identification of Identical or Homologous Genes by Screening Expression Libraries with Antibodies

[0316] c-DNA clones can be used to produce recombinant polypeptide for example in E. coli (e.g. Qiagen QIAexpress pQE system). Recombinant polypeptides are then normally affinity purified via Ni-NTA affinity chromatography (Qiagen). Recombinant polypeptides are then used to produce specific antibodies for example by using standard techniques for rabbit immunization. Antibodies are affinity purified using a Ni-NTA column saturated with the recombinant antigen as described by Gu et al., 1994, BioTechniques 17:257-262. The antibody can then be used to screen expression cDNA libraries to identify identical or heterologous genes via an immunological screening (Sambrook, J. et al., 1989, “Molecular Cloning: A Laboratory Manual,” Cold Spring Harbor Laboratory Press or Ausubel, F. M. et al., 1994, “Current Protocols in Molecular Biology”, John Wiley & Sons).

[0317] Reducing the Expression of the Genes of the Invention by Artificial Transcription Factors

[0318] The genes of the invention and their homologous ORFs in other species may also be down regulated by introducing a synthetic specific repressor. For this purpose, a gene for a chimeric zinc finger protein, which binds to a specific region in the regulatory or coding region of the genes of interests or its homologs in other spezies is constructed. The artificial zinc finger protein comprises a specific DNA-binding domain consting for example of zinc finger and optional an repression like the EAR domain (Hiratsu et al., 2003. Plant J. 34(5), 733-739 Dominant repression of target genes by chimeric repressors that include the EAR motif, a repression domain, in Arabidopsis.) Expression of this chimeric repressor for example in plants then results in specific repression of the target gene or of its homologs in other plant species lead to increased metabolite production The experimental details especially about the design and construction of specific zinc finger domains may be carried out as described, or WO 01/52620 or Ordiz M I, (Proc. Natl. Acad. Sci. USA, 2002, Vol. 99, Issue 20, 13290) or Guan, (Proc. Natl. Acad. Sci. USA, 2002, Vol. 99, Issue 20, 13296).

[0319] Knock Out of the Genes of the Invention by Homologous Recombination

[0320] Identifying mutations in the genes of the invention in random mutagenized populations

### a) In Chemically or Radiation Mutated Population

[0321] Production of chemically or radiation mutated populations is a common technique and known to the skilled worker. Methods are described by Koorneef et al. 1982 and the citations therein and by Lightner and Caspar in “Methods in Molecular Biology” Vol 82. These techniques usually induce point mutations that can be identified in any known gene using methods such as TILLING (Colbert et al. 2001).

### b) In T-DNA or Transposon Mutated Population by Reserve Genetics

[0322] Reverse genetic strategies to identify insertion mutants in genes of interest have been described for various cases expecially Arabidopsis eg. Krysan et al., 1999 (Plant Cell 1999, 11, 2283-2290); Sessions et al., 2002 (Plant Cell 2002, 14, 2985-2994); Young et al., 2001, (Plant Physiol. 2001, 125, 513-518); Koprek et al., 2000 (Plant J. 2000, 24, 253-263); Jeon et al., 2000 (Plant J. 2000, 22, 561-570); Tissier et al., 1999 (Plant Cell 1999, 11, 1841-1852); Speulmann et al., 1999 (Plant Cell 1999, 11, 1853-1866). Also for crops insertional Briefly material from all plants of a large T-DNA or transposon mutagenized plant population is harvested and genomic DNA prepared. Then the genomic DNA is pooled following specific architectures as described for example in Krysan et al., 1999 (Plant Cell 1999, 11, 2283-2290). Pools of genomics DNAs are then screened by specific multiplex PCR reactions detecting the combination of the insertional mutagen (e.g. T-DNA or Transposon) and the gene of interest. Therefore PCR reactions are run on the DNA pools with specific combinations of T-DNA or transposon border primers and gene specific primers. General rules for primer design can again be taken from Krysan et al., 1999 (Plant Cell 1999, 11, 2283-2290). Rescreening of lower levels DNA pools lead to the identification of individual plants in which the gene of interest is disrupted by the insertional mutagen. These methods can as well be applied to crop populations that are mutated with insertional mutagenesis such as corn (Fernandes J, Dong Q, Schneider B, Morrow D J, Nan G L, Brendel V, Walbot V.Genome Biol. 2004; 5(10):R82. Epub 2004 September 23 Genome-wide mutagenesis of Zea mays L. using RescueMu transposons) or rice (Sallaud C, Gay C, Larmande P, Bes M, Piffanelli P, Piegu B, Droc G, Regad F, Bourgeois E, Meynard D, Perin C, Sabau X, Ghesquiere A, Glaszmann J C, Delseny M, Guiderdoni E. Plant J. 2004 August; 39(3):450-64. High throughput T-DNA insertion mutagenesis in rice: a first step towards in silico reverse genetics)

[0323] Furthermore systematic sequencing of insertions sides in T-DNA or transposon mutagenized population is under way also in crops allowing the simple in silico search for crop lines having mutated the genes of the invention (Sallaud C, Gay C, Larmande P, Bes M, Piffanelli P, Piegu B, Droc G, Regad F, Bourgeois E, Meynard D, Perin C, Sabau X, Ghesquiere A, Glaszmann J C, Delseny M, Guiderdoni E. Plant J. 2004 August; 39(3):450-64. High throughput T-DNA insertion mutagenesis in rice: a first step towards in silico reverse genetics;

[0324] Ryu C H, You J H, Kang H G, Hur J, Kim Y H, Han M J, An K, Chung B C, Lee C H, An G., Plant Mol. Biol. 2004 March; 54(4):489-502, Generation of T-DNA tagging lines with a bidirectional gene trap vector and the establishment of an insertion-site database.)

The application's sequence listing, which the Patent Office published only in electronic form, follows.

SEQUENCE LISTING (876 sequences)

SEQ ID NO: 1 - DNA, 1458 bp, Arabidopsis thaliana
  CDS (1)..(1458)
atgggaggttgcgtgtcgacgccgaagagctgtgttggagcaaaactgaggtcaagtaaacgaaggaagagtcgtagacgacgaaaaattcaaaggaagagagccgccgtctcttctcgtctctctgacggatctttcgacaatctcgatcatcatcatcgcaacttctctaatcccagttctcgagcaactggcgaagacgcatggtttgagtccaatgtcgcatttgaaacagactgtgatgatgatttccacagtgttcatgaagatgcattgtctttaaacggatctgagcgtgtatcactctcgagtacgacaaccacatcatcaacacgagacactgattcaaatgaagtgatgtctcaatcgaaatcagacggtgacttaaacgacacaaaccagcctgatttgattgattcatctgcagatgaaggtctcttggaaaactgcaggatcttaccgagtaattgtttgccttgtctgaatacaacaactgttccttctattgacaagagaaggtctcttagctctagccctcccagttccaggaaaaaatcatctcttagactttcttataaatggagagaaggtcatgcttcaggagccttgtttttgtcgaaaatgcagctgaagagaccgatagcgggttctcaggttcctttctgtccaattgataagaaaatgctcgattgttggtcaaccattgatccaaatagttttcgggttcgtggcaaaacatatctcagggagaagaagaaagagtttgcacctagccatgctgcgtacaatccttttggtgtcgatgttttcctatcggaacacaaaatacaccatgttgcacaatatgtcaaacttcctgttactaccacatccacaaaactcccatctatccttgttgtaaatgttcagattccgttatatccaactgcaatctttcaaggtgaatctgatggagaaggaatgaatattgtattatacttcaaactctcggataattattcaaaggaacttccgctccattttcaagaaagcattcggagattaatagatgatgaggttgagaaagttaaaggcttccctttggatacaacggcaccttttagagagcggcttaagatattgggacgtgttgcaaacgtggatgatctccatttgagtggtccggagaaaaaactgatgcaggcttataacgagaaacctgtactttcacgtccgcagcacgaattctacttgggtgacaattactttgagattgatatcgatatgcatagattcggttatatatcgcggaaagggtttgaaacattcatagacagactcaagatctgtgttcttgatgttggcctcacaattcaggggaacaaaccagaggagctaccggagcagattctgtgttgcgtcaggctaaatgggattgatttcatgaactatcatcaattaactcaagaactcctatga

SEQ ID NO: 2 - protein, 485 aa, Arabidopsis thaliana
MGGCVSTPKSCVGAKLRSSKRRKSRRRRKIQRKRAAVSSRLSDGSFDNLDHHHRNFSNPSSRATGEDAWFESNVAFETDCDDDFHSVHEDALSLNGSERVSLSSTTTTSSTRDTDSNEVMSQSKSDGDLNDTNQPDLIDSSADEGLLENCRILPSNCLPCLNTTTVPSIDKRRSLSSSPPSSRKKSSLRLSYKWREGHASGALFLSKMQLKRPIAGSQVPFCPIDKKMLDCWSTIDPNSFRVRGKTYLREKKKEFAPSHAAYNPFGVDVFLSEHKIHHVAQYVKLPVTTTSTKLPSILVVNVQIPLYPTAIFQGESDGEGMNIVLYFKLSDNYSKELPLHFQESIRRLIDDEVEKVKGFPLDTTAPFRERLKILGRVANVDDLHLSGPEKKLMQAYNEKPVLSRPQHEFYLGDNYFEIDIDMHRFGYISRKGFETFIDRLKICVLDVGLTIQGNKPEELPEQILCCVRLNGIDFMNYHQLTQELL

SEQ ID NO: 3 - DNA, 402 bp, Arabidopsis thaliana
  CDS (1)..(402)
atggagatgctcaagttgtcaaaattcaaattgcagcttcagtcaatgatcggagaagtgcgagatctgcgtgtaaggagaaagaggtttctatacatctatggattgtgtatcttcttcgctccaccagtttctctcttcttcttcttcgtcttcttccactttactaccggcgtttttgcaggaaagggagcgatcagtcacagatcacattactcttgcgaatcaggttcttcgatcaataaacagaagcaaacggaggaggactgcatcaggaaagtgcaggagcttcaagctgatttagcttcttctagagaaacacaggaggcactcgagagaaaggtttggaagattcttctcttctgcgaatctatttcacatggagttagtgaaagtttctaa

SEQ ID NO: 4 - protein, 133 aa, Arabidopsis thaliana
MEMLKLSKFKLQLQSMIGEVRDLRVRRKRFLYIYGLCIFFAPPVSLFFFFVFFHFTTGVFAGKGAISHRSHYSCESGSSINKQKQTEEDCIRKVQELQADLASSRETQEALERKVWKILLFCESISHGVSESF

SEQ ID NO: 5 - DNA, 1470 bp, Arabidopsis thaliana
  CDS (1)..(1470)
atgggatctcagatcattcataactcacaaaaaccacatgtagtttgtgttccatatccggctcaaggccacatcaaccctatgatgagagtggctaaactcctccacgccagaggcttctacgtcaccttcgtcaacaccgtctacaaccacaatcgtttccttcgttctcgtgggtccaatgccctagatggacttccttcgttccgatttgagtccattgctgacggtctaccagagacagacatggatgccacgcaggacatcacagctctttgcgagtccaccatgaagaactgtctcgctccgttcagagagcttctccagcggatcaacgctggagataatgttcctccggtaagctgtattgtatctgacggttgtatgagctttactcttgatgttgcggaggagcttggagtcccggaggttcttttttggacaaccagtggctgtgcgttcctggcttatctacacttttatctcttcatcgagaagggcttatgtccgctaaaagatgagagttacttgacgaaggagtacttagaagacacggttatagattttataccaaccatgaagaatgtgaaactaaaggatattcctagcttcatacgtaccactaatcctgatgatgttatgattagtttcgccctccgcgagaccgagcgagccaaacgtgcttctgctatcattctaaacacatttgatgaccttgagcatgatgttgttcatgctatgcaatctatcttacctccggtttattcagttggaccgcttcatctcttagcaaaccgggagattgaagaaggtagtgagattggaatgatgagttcgaatttatggaaagaggagatggagtgtttggattggcttgatactaagactcaaaatagtgtcatttatatcaactttgggagcataacggttttgagtgtgaagcagcttgtggagtttgcttggggtttggcgggaagtgggaaagagtttttatgggtgatccggccagatttagtagcgggagaggaggctatggttccgccggactttttaatggagactaaagaccgcagtatgctagcgagttggtgtcctcaagagaaagtactttctcatcctgctattggagggtttttgacgcattgcgggtggaactcgatattggaaagtctttcgtgtggagttccgatggtgtgttggccattttttgctgaccagcaaatgaattgtaagttttgttgtgacgagtgggatgttgggattgagataggtggagatgtgaagagagaggaagttgaggcggtggttagagagctcatggatggagagaagggaaagaaaatgagagaaaaggcggtagagtggcagcgcttagccgagaaagcgacggaacataaacttggttcttccgttatgaattttgagacggttgttagcaagtttcttttgggacaaaaatcacaggattaa

SEQ ID NO: 6 - protein, 489 aa, Arabidopsis thaliana
MGSQIIHNSQKPHVVCVPYPAQGHINPMMRVAKLLHARGFYVTFVNTVYNHNRFLRSRGSNALDGLPSFRFESIADGLPETDMDATQDITALCESTMKNCLAPFRELLQRINAGDNVPPVSCIVSDGCMSFTLDVAEELGVPEVLFWTTSGCAFLAYLHFYLFIEKGLCPLKDESYLTKEYLEDTVIDFIPTMKNVKLKDIPSFIRTTNPDDVMISFALRETERAKRASAIILNTFDDLEHDVVHAMQSILPPVYSVGPLHLLANREIEEGSEIGMMSSNLWKEEMECLDWLDTKTQNSVIYINFGSITVLSVKQLVEFAWGLAGSGKEFLWVIRPDLVAGEEAMVPPDFLMETKDRSMLASWCPQEKVLSHPAIGGFLTHCGWNSILESLSCGVPMVCWPFFADQQMNCKFCCDEWDVGIEIGGDVKREEVEAVVRELMDGEKGKKMREKAVEWQRLAEKATEHKLGSSVMNFETVVSKFLLGQKSQD

SEQ ID NO: 7 - DNA, 1584 bp, Arabidopsis thaliana
  CDS (1)..(1584)
atggcgcttatgaatggaagcatgaatctatcatcggtcaaatcatcgatgatcaaccaccgtcaaccaaacttctcctccgccgtctccagacccacttctttccggatctccgccgtgcaaaccgacccaaaaacaccagctgcttcatcggcgtcggcggcgacgacgactccggcaacgttgacgaagcccgttggagttaatgtgggtaaaggaaaatgggcaccagagagttggaggacgaagaaagctttacagcaaccggactatccagatttagctgcgcttgaagctgtgctagagacgatcgaagcttttcctccgatcgtgttcgccggagaagctagattgcttgaggaacgattaggacaagcagcgatgggtgaagcgtttctgttacaaggaggagattgtgcagagagtttcaaagagtttaatgcgaataacattcgtgatactttcaggattcttcttcagatgggtgctgtgttgatgttcggaggtcaagtccctgttgttaaggttgggagaatggcgggtcaatttgcgaaaccaagatcggattcgtttgaggagaaagatggagtgaaattgcctagttacagaggagataacattaatggagatgcgtttgattcgaaatctaggattcctgatccacagaggatgattagagcttattgtcaatctgcagctactttgaatcttttgagagcttttgctactggtggttatgctgctatgcagagagttactcaatggaatcttgatttcactgaacgtagtgagcaaggagacaggtaccgtgaactagctaaccgtgttgatgaagcgcttggtttcatgcacgctgctggattaacgctcgatcatcccataatgcaaacaaccgacttctggacttctcatgaatgtttgctcttgccttatgaacaatcactaacaaggcttgactcaacctctggtctctactacgattgttctgcccatatgatttgggtcggtgagcgaaccagacagctagatggtgcccatgtcgagttcttaagaggtgttgctaatcctcttggaatcaaggtgagtgataaaatggatccaaaggagctagtgaagttgattgagatcttgaatgctgacaataagcctggaaggattacaataatcacaagaatgggagctgagaatatgagagtgaagcttcctcatttgatcagagaagtgcgacgtgctggacagattgtgacttgggtcagtgatccaatgcacggaaacaccattaaggctccttgtggtctcaagactcgtccctttgacgccatcttggctgaagtgagagctttcttcgacgtgcacgagcaagaaggtagccaccccggaggaattcacctagaaatgactggtcagaacgtgaccgagtgcatcggtggttcacgcacagtcacattcgacgacttgggttcacgttaccacacgcactgtgatcctcgccttaatgcttcacagtctcttgagctctccttcatcatcgccgaacgtcttagaaagagacgcatcaagtctcaaaaggcttttgccctctaa

SEQ ID NO: 8 - protein, 527 aa, Arabidopsis thaliana
MALMNGSMNLSSVKSSMINHRQPNFSSAVSRPTSFRISAVQTDPKTPAASSASAATTTPATLTKPVGVNVGKGKWAPESWRTKKALQQPDYPDLAALEAVLETIEAFPPIVFAGEARLLEERLGQAAMGEAFLLQGGDCAESFKEFNANNIRDTFRILLQMGAVLMFGGQVPVVKVGRMAGQFAKPRSDSFEEKDGVKLPSYRGDNINGDAFDSKSRIPDPQRMIRAYCQSAATLNLLRAFATGGYAAMQRVTQWNLDFTERSEQGDRYRELANRVDEALGFMHAAGLTLDHPIMQTTDFWTSHECLLLPYEQSLTRLDSTSGLYYDCSAHMIWVGERTRQLDGAHVEFLRGVANPLGIKVSDKMDPKELVKLIEILNADNKPGRITIITRMGAENMRVKLPHLIREVRRAGQIVTWVSDPMHGNTIKAPCGLKTRPFDAILAEVRAFFDVHEQEGSHPGGIHLEMTGQNVTECIGGSRTVTFDDLGSRYHTHCDPRLNASQSLELSFIIAERLRKRRIKSQKAFAL

SEQ ID NO: 9 - DNA, 1836 bp, Arabidopsis thaliana
  CDS (1)..(1836)
atggctttctcacaagctgctctctctgcgttgcctctttctgatcgaactttccgcaaaaagccatcttcttcttcttcatcttcaccgaatttcgttctgagagtaagagctgctgcaaaagaagttcactttaaccgtgatggctctgtcaccaagaagcttcaggcaggtgcagatatggtggctaaactattaggcgtgacgttaggtccaaagggacgaaacgtggtgttgcagaacaagtacgggcctcctaggattgtcaatgacggtgaaactgttcttaaagagattgaattggaggacccgttagagaatgttggagtgaaacttgtgaggcaagcgggtgctaagactaatgaccttgccggtgatggttccactacatctataattcttgctcatggccttattactgaaggtattaaggtgatttctgctggaacaaatcccatccaagttgcccgtggtattgagaaaaccacaaaagctcttgttttagagctcaagtcaatgtccagagagattgaagatcatgagcttgctcatgttgcagcagttagtgcggggaatgactacgaagtgggaaacatgatttccaatgcttttcaacaagtaggaaggactggtgtagtaacaatagagaaaggaaaataccttgtgaacaatctcgagattgtggaaggaatgcagtttaatcgtggctacttatcgccatactttgtcactgatcgaaggaagagggaagctgaattccatgattgcaagctgcttttggtagataagaaaataacaaatccaaaagatatgttcaagatattggattctgctgttaaagaggaatttccagttctaatagttgccgaagatattgagcaagacgctcttgctcctgttattaggaacaaactaaaaggtaacctgaaggtggcagccatcaaagctcctgcttttggggagcgcaagagtcactgcttggatgatcttgcaatctttactggagccaccgtgatcagagatgagatgggcctgagcttagaaaaggctggaaaggaggtcttaggaacagcaaaaagggttcttgttactaaggattcaacactgattgttaccaacggattcacccagaaagcagtcgacgaaagggtttcgcagattaaaaatcttatcgagaacaccgaggagaattttcagaagaagatcctcaatgaaagagtagccagattatctggtggaattgcaataatccaggtaggtgcactgacacaagttgagttgaaggataaacagctaaaggttgaagatgccctgaatgcaactaagtcagcaattgaagaagggattgtagttggtggtggttgcgccctcttgcgactggctacaaaagtggacagaatcaaagagacccttgacaacacagaacagaagattggagctgaaatcttcaagaaagcattgagctaccccataagacttatagccaaaaacgcagacacaaatggcaatatcgtcatagaaaaggtcttatcgaacaaaaacaccatgtacggttacaatgctgcaaagaatcaatatgaagatctgatgttggctggtataattgatccaaccaaggttgtgagatgttgcttggaacacgcttcatcagtggctcaaacgtttctgacatcggattgcgttgtagttgagatcaaagaaatcaaaccaagaccaatcattaatccaccattacctacttcttctccagctacctcctccatgttccctgacagaaaattaccaagatttcctcaaattatgccaagaactcgaagccactttccacggaagtag

SEQ ID NO: 10 - protein, 611 aa, Arabidopsis thaliana
MAFSQAALSALPLSDRTFRKKPSSSSSSSPNFVLRVRAAAKEVHFNRDGSVTKKLQAGADMVAKLLGVTLGPKGRNVVLQNKYGPPRIVNDGETVLKEIELEDPLENVGVKLVRQAGAKTNDLAGDGSTTSIILAHGLITEGIKVISAGTNPIQVARGIEKTTKALVLELKSMSREIEDHELAHVAAVSAGNDYEVGNMISNAFQQVGRTGVVTIEKGKYLVNNLEIVEGMQFNRGYLSPYFVTDRRKREAEFHDCKLLLVDKKITNPKDMFKILDSAVKEEFPVLIVAEDIEQDALAPVIRNKLKGNLKVAAIKAPAFGERKSHCLDDLAIFTGATVIRDEMGLSLEKAGKEVLGTAKRVLVTKDSTLIVTNGFTQKAVDERVSQIKNLIENTEENFQKKILNERVARLSGGIAIIQVGALTQVELKDKQLKVEDALNATKSAIEEGIVVGGGCALLRLATKVDRIKETLDNTEQKIGAEIFKKALSYPIRLIAKNADTNGNIVIEKVLSNKNTMYGYNAAKNQYEDLMLAGIIDPTKVVRCCLEHASSVAQTFLTSDCVVVEIKEIKPRPIINPPLPTSSPATSSMFPDRKLPRFPQIMPRTRSHFPRK

SEQ ID NO: 11 - DNA, 1437 bp, Arabidopsis thaliana
  CDS (1)..(1437)
atggccaatcctaatggttggccgtctttacttatgttggtcatagccttgtattccgtttctgctcatacaagtgcccaatacacatactctccaccatcaccaccatcatatgtttacaaacctcctacacatatctatagctctccaccacctcctccttacgtttatagttctccaccacctcctccatatatttacaagtcgccaccacctcctccatacgtttatagttctcctccacctccaccatatatttacaagtctcccccaccacctccttacgtctatagctctccaccaccacctccatatatttacaagtcgccaccgcctcctccttatgtttacagctctccaccgcctcctccatatgtttacaagtctccccctcctcctccatacgtctataactctccaccgcctcctccatatgtttacaagtctccgccaccaccaccctacgtctacagttctccaccaccacctccatatgtttacaagtcgccaccacctcctccttacgtttatagttctcctccacctccaccatatgtttacaagtctccaccaccacctccttacgtctatagctctccaccaccacctccatatgtttacaagtcgccaccacctcctccttatgtttacagctctccaccgcctcctccatatgtttacaagtctccccctcctcctccatacgtctacagctctccaccaccacctccatatgtttacaagtcgccaccacctcctccttacgtttatagttctcctccacctccaccatatgtttacaagtctccaccaccacctccttacgtctatagctctccaccaccacctccatatgtttacaagtcgccaccacctcctccttatgtttacagctctccaccgcctcctccatatgtttacaagtctccccctcctcctccatacgtctacagctctccaccgcctcctccatatgtttacaagtctccccctcctcctccatacgtttacaactccccaccgcctcctccatatgtttacaagtcgccaccacctcctccttacgtttatagttctcctccaccttcaccatatgtgtacaagtcgccaccacctcctccttatgtttacagttctccaccgcctcctccatatgtttacaagtctccccctcctcctccatacgtctacagctctccaccgcctcctccatatgtttacaagtcgccaccacctcctccgtacgtctacagctctccaccgcctcctccgtatgtttacaagtcgccaccacctcctccttacgtctacagctctccgccaccacctccctatgtctacaagtcgccatcacctcctccatacgtttacaagtctccaccgccacctccaagctatagctatagctatagctcaccccctcctccaatatactaa

SEQ ID NO: 12 - protein, 478 aa, Arabidopsis thaliana
MANPNGWPSLLMLVIALYSVSAHTSAQYTYSPPSPPSYVYKPPTHIYSSPPPPPYVYSSPPPPPYIYKSPPPPPYVYSSPPPPPYIYKSPPPPPYVYSSPPPPPYIYKSPPPPPYVYSSPPPPPYVYKSPPPPPYVYNSPPPPPYVYKSPPPPPYVYSSPPPPPYVYKSPPPPPYVYSSPPPPPYVYKSPPPPPYVYSSPPPPPYVYKSPPPPPYVYSSPPPPPYVYKSPPPPPYVYSSPPPPPYVYKSPPPPPYVYSSPPPPPYVYKSPPPPPYVYSSPPPPPYVYKSPPPPPYVYSSPPPPPYVYKSPPPPPYVYSSPPPPPYVYKSPPPPPYVYNSPPPPPYVYKSPPPPPYVYSSPPPSPYVYKSPPPPPYVYSSPPPPPYVYKSPPPPPYVYSSPPPPPYVYKSPPPPPYVYSSPPPPPYVYKSPPPPPYVYSSPPPPPYVYKSPSPPPYVYKSPPPPPSYSYSYSSPPPPIY

SEQ ID NO: 13 - DNA, 1584 bp, Arabidopsis thaliana
  CDS (1)..(1584)
atgggttcagagtataagcatatattgaagagtctctgtttaagccatggatggtcttatgctgtgttttggcgttatgatcccatcaattccatgatattgagatttgaagaagcatacaatgatgaacaatcagtcgcactagttgatgatatggttctccaggctcctatcttaggccaaggaattgtgggagaagtagcttcatccggaaaccatcaatggctgttctcagacacattgtttcagtgggaacatgagtttcagaatcagtttctctgtggctttaagattcttatacggcagtttacttatacacagactatcgcaatcattccactaggatccagcggcgttgttcagctaggatctactcaaaagattcttgagagcacagagatattggaacaaacaacaagagctctccaggagacgtgtttaaagccacatgattccggtgatctcgatactctgtttgagtcactgggagattgtgagattttcccagctgaatcttttcaaggatttagctttgatgacatcttcgctgaggacaatcctccttctttgctcagccctgagatgatctcctctgaagcagcttcttccaaccaagatctgaccaatggagatgattatgggttcgacattctccagtcttactctctggacgatctataccagctgctcgctgatccaccagaacagaactgctcttccatggtgatccaaggagttgacaaggatcttttcgacattttggggatgaattctcaaacgcctacaatggctttgccacctaaaggactcttctcagagctcataagcagcagtcttagcaacaacacttgtagtagttctctcacgaacgtgcaagagtactctggtgtgaaccagagcaaaagacggaagcttgatacatcatcggcgcatagctcaagcttgttccctcaggaggagacagtaacaagtcggagtttgtggattgatgatgatgagagatcaagtattggagggaactggaagaagcctcacgaagaaggtgtgaagaagaaaagagcaaaggcaggagaaagcaggaggccgaggcctaaggaccgtcagatgatacaagaccgtatcaaggagttgcgagggatgattccaaatggagctaagtgtagcatagatacgttgctggatctgaccataaaacacatggtgttcatgcaaagcctcgccaagtatgcagagagactcaaacaaccatacgagtctaagctggtgaaggagaaagagagaacatgggcgttggaagtgggggaagaaggagtggtatgtccgataatggtggaggaattgaacagggaaggagaaatgcagatagagatggtgtgtgaggaaagagaggagttcttggagataggacaagtggtgagaggattgggattgaagatattgaaaggagtgatggaaacaagaaaaggacaaatatgggcacacttcatcgtacaggcaaagccacaagtcacaaggattcaagtcttgtactcacttgttcagctctttcaacaccacaccaaacatgatgatttattatcatag

SEQ ID NO: 14 - protein, 527 aa, Arabidopsis thaliana
MGSEYKHILKSLCLSHGWSYAVFWRYDPINSMILRFEEAYNDEQSVALVDDMVLQAPILGQGIVGEVASSGNHQWLFSDTLFQWEHEFQNQFLCGFKILIRQFTYTQTIAIIPLGSSGVVQLGSTQKILESTEILEQTTRALQETCLKPHDSGDLDTLFESLGDCEIFPAESFQGFSFDDIFAEDNPPSLLSPEMISSEAASSNQDLTNGDDYGFDILQSYSLDDLYQLLADPPEQNCSSMVIQGVDKDLFDILGMNSQTPTMALPPKGLFSELISSSLSNNTCSSSLTNVQEYSGVNQSKRRKLDTSSAHSSSLFPQEETVTSRSLWIDDDERSSIGGNWKKPHEEGVKKKRAKAGESRRPRPKDRQMIQDRIKELRGMIPNGAKCSIDTLLDLTIKHMVFMQSLAKYAERLKQPYESKLVKEKERTWALEVGEEGVVCPIMVEELNREGEMQIEMVCEEREEFLEIGQVVRGLGLKILKGVMETRKGQIWAHFIVQAKPQVTRIQVLYSLVQLFQHHTKHDDLLS

SEQ ID NO: 15 - DNA, 798 bp, Arabidopsis thaliana
  CDS (1)..(798)
atgtcttctccactcgccgcaaaatcaaacctaaccacgactcgatcggcttcgttaaacattccacattcgacacgtaccaatcacaaccacgatctccggtatagtctttccgctggtcctcgtacgaacgaagatcgaccagcttctgggaacggcgtcgccggaatcctctataaatgggtaaactacggccaaggatggaaacgacggtggttcgtactccaggacggtgttttgtcgtattatagaatccatggtcccgataaaatatctctctccgttgagatggatcggagatctaaactgatcggcggcgaatctttacggtttatttgccgacatagcaaacgcggtgatgttcatagccccgggaaacctctcggccaaattcacctcaaggtttcatcgattggacaaagcatatcagatggcaagagattcactgtattcacgggcacgaagagtctgcatttacgagcagcaacgagcgaggatcgtgcctcttggatcgaagcattgaaagctgttaaagaaacgtttccaagaatgtcaaacgaagaactaatggcatcgacgactaatgtctcagtctcgaccgataagctaaggcagagattaatggaagaagaggtagatgagacaatcatcaaagattgcgaagacataatgaagaacaatttcttagcattgcatgatgaggttatgtctctaaaacggtaccaatatcatcttatagattctctcaagaacgtcagtaactcacctataagacccagtaaccaaagtttttcatga

SEQ ID NO: 16 - protein, 265 aa, Arabidopsis thaliana
MSSPLAAKSNLTTTRSASLNIPHSTRTNHNHDLRYSLSAGPRTNEDRPASGNGVAGILYKWVNYGQGWKRRWFVLQDGVLSYYRIHGPDKISLSVEMDRRSKLIGGESLRFICRHSKRGDVHSPGKPLGQIHLKVSSIGQSISDGKRFTVFTGTKSLHLRAATSEDRASWIEALKAVKETFPRMSNEELMASTTNVSVSTDKLRQRLMEEEVDETIIKDCEDIMKNNFLALHDEVMSLKRYQYHLIDSLKNVSNSPIRPSNQSFS

SEQ ID NO: 17 - DNA, 2265 bp, Arabidopsis thaliana
  CDS (1)..(2265)
atgatgcgtgaaccgcttgttagcgaagaagaagaagaagaagctactgaagttttactagtggagaagacgaagttgtgtaagagacgaggagacgaagaaaaaacggaagagagaagagacgatttgttgttactagctttaacgccgatggtacgatcgaaatctcaaggaactactcggcgcgtcactcccacgccacctcctgttgacgtggagaaaccgttaccaaacggagatctctacatgggaacgttttccggcgggtttcccaacggatccggtaagtatttgtggaaggatgggtgtatgtacgaaggcgagtggaaacgtggtaaagcgagtggtaaaggcaagttttcgtggccgagtggtgcgacttatgaaggagagttcaaatctgggagaatggaaggatctgggacttttgttggtgttgatggtgatacttatcgtggctcttgggttgctgatcggaaacaaggtcatggtcagaagagatatgccaacggagattactatgaaggtacatggcggcggaatcttcaggatgggagagggagatatgtttggatgaatgggaatcagtatacaggagagtggagaaatggtgtgatatgtggtaaaggtgtgcttgcttggcctaatgggaatagatatgaaggtcaatgggaaaatggtgttcctaaaggaagtggtgtgtttacttgggctgatggaagttcgtggattggttcttggaatgagagtagtaatctcatgaggaatttctttgatgggattgagaagaatgagttgattgttgcgactaggaagagatcttcggttgatagtggcgctggaagtttgactggggagaagattttccctaggatatgtatttgggagtctgatggagaagctggggatattacttgtgatattgttgataatgtggaagcttctgtgatatacagagataggatttctattgataaagatgggtttcgtcagtttaggaagaatccttgttgtttcagcggtgaggctaagaaacctggagagacgatatctaaagggcataagaaatatgatttgatgctcaacctgcagcatggaattaggtactctgtcggcaaacacgcttccgttgttcgagatctcaaacagagtgattttgacccaagtgaaaagttctggacaaggttcccaccggagggttctaagaccacaccaccgcatctatctgtggatttccgctggaaggactattgccctttggtgtttagacggcttagggagctattcacggtggatcctgccgattacatgctagctatctgtggaaacgatgcccttagggaattgtcttcgcctggaaagagtggaagctttttttacttaactcaagatgacagatttatgatcaagacggtgaagaaatctgaagtcaaggtgcttctacgaatgcttccaagttactacaaacacgtctgccagtatgaaaatacacttgtgactaggttctatggtgtgcattgtatcaaacctgttggtggccagaagactcggtttatcgttatggggaacttgttctgctccgaatatagaatccagagaaggtttgaccttaaagggtcttcccatggacggtatacctccaaacctgaaggggaaattgatgagaccactactcttaaggaccttgatctcaattttgctttccgtcttcagagaaattggtaccaagagcttatgacgcaaattaaacgcgactgtgagttcttggaagctgaaagaataatggattatagtcttttggttggcgttcacttccgtgatgacaacacaggagacaaaatggggttatctccatttgtattgagatctggtaagatagagtcataccaaagcgaaaaatttatgcgtggttgtcggttcttggaggcggaacttcaagacatggaccgcattttagctggcaggaaaccattgattcgattaggcgcaaacatgcctgcaagagcagaacgaatggcgagaagaagcgactatgatcagtattcctcaggagggaccaactaccaatctcatggagaggtctacgaagtggttctatattttggaatcattgacattttacaagattacgacataagcaagaagatcgagcatgcttacaagtctctacaagctgacccggcttcaatctctgccgttgatcccaaactatactcaagaaggtttagagatttcatcagcagaatcttcatcgaagacggctaa

SEQ ID NO: 18 - protein, 754 aa, Arabidopsis thaliana
MMREPLVSEEEEEEATEVLLVEKTKLCKRRGDEEKTEERRDDLLLLALTPMVRSKSQGTTRRVTPTPPPVDVEKPLPNGDLYMGTFSGGFPNGSGKYLWKDGCMYEGEWKRGKASGKGKFSWPSGATYEGEFKSGRMEGSGTFVGVDGDTYRGSWVADRKQGHGQKRYANGDYYEGTWRRNLQDGRGRYVWMNGNQYTGEWRNGVICGKGVLAWPNGNRYEGQWENGVPKGSGVFTWADGSSWIGSWNESSNLMRNFFDGIEKNELIVATRKRSSVDSGAGSLTGEKIFPRICIWESDGEAGDITCDIVDNVEASVIYRDRISIDKDGFRQFRKNPCCFSGEAKKPGETISKGHKKYDLMLNLQHGIRYSVGKHASVVRDLKQSDFDPSEKFWTRFPPEGSKTTPPHLSVDFRWKDYCPLVFRRLRELFTVDPADYMLAICGNDALRELSSPGKSGSFFYLTQDDRFMIKTVKKSEVKVLLRMLPSYYKHVCQYENTLVTRFYGVHCIKPVGGQKTRFIVMGNLFCSEYRIQRRFDLKGSSHGRYTSKPEGEIDETTTLKDLDLNFAFRLQRNWYQELMTQIKRDCEFLEAERIMDYSLLVGVHFRDDNTGDKMGLSPFVLRSGKIESYQSEKFMRGCRFLEAELQDMDRILAGRKPLIRLGANMPARAERMARRSDYDQYSSGGTNYQSHGEVYEVVLYFGIIDILQDYDISKKIEHAYKSLQADPASISAVDPKLYSRRFRDFISRIFIEDG

SEQ ID NO: 19 - DNA, 2304 bp, Arabidopsis thaliana
  CDS (1)..(2304)
atggctaaacaactgcttcttcttctccttctcttcatcgtccacggcgttgaatcagctcctccgccgcactcctgtgacccttcaaatccaaccacgaaactctaccagttctgccgcactgacctcccaattggcaagcgagcgcgtgatctcgtctcgaggctaaccatagacgagaagatctcgcagctggtgaatacagctccagggataccgcgtcttggagttccggcgtacgaatggtggtcagaagctttacacggcgtagcctacgccggtccaggaatccggtttaacggaacggttaaagctgctaccagctttcctcaagtcatcttgaccgctgcttcattcgactcctatgaatggttccgcattgctcaagttataggaaaggaagcaagaggagtgtacaacgcagggcaagcgaatggaatgacattttgggcaccaaacattaacatatttagagatccacggtggggaagaggccaagaaactcccggcgaggatccgatgatgaccggaacttacgcggtggcttacgttagaggactacaaggtgactcttttgacggtcggaaaacactctccaatcatctccaagcctccgcttgttgtaagcattttacagcgtacgatcttgatcgttggaagggtattactcgctacgtcttcaatgctcaggtgagtttggctgacttggcggagacgtaccaaccaccgttcaagaaatgcatagaagaaggtcgagccagtggcatcatgtgtgcttataaccgagtcaacggcattccttcttgcgctgacccgaatcttttgactcgaaccgctcgtggtcaatgggctttccgcggatacattacttcagattgtgacgcagtctcaatcatctacgatgctcaaggctacgctaaaagccctgaagacgctgttgctgatgtcctcaaagctggcatggacgtaaactgtggatcatacttacaaaaacacaccaaatcagctcttcaacagaagaaagtgtctgaaacagacattgacagagctctactcaatcttttctctgttaggattcgtctcggtctctttaacggcgatccaaccaaattaccttacggaaacattagtcctaacgaagtttgttcaccggctcatcaagctttagcacttgatgctgctcgtaatggtatagttctcttgaaaaacaatcttaaactccttcctttctccaaacgcagcgtttcgtctttagctgtgatcggtccaaacgctcacgtcgttaaaacgcttcttggaaactacgctggtccgccttgtaagactgtgactcctcttgatgccttacgtagttatgtcaaaaacgctgtttaccaccaaggatgtgattccgtggcttgctctaacgctgcgattgatcaagcggttgcaattgcaaaaaatgctgatcatgtggttttgattatgggactagaccagactcaagagaaagaagattttgaccgtgtggaccttagtcttcccgggaagcaacaagaactcataacaagcgttgcaaatgctgcaaagaaaccggtggtccttgttctgatatgtggcggtcctgtcgatatttcatttgctgcgaataacaataagataggaagcattatatgggctggttatcctggagaagctggagggattgctatttctgaaatcatattcggagatcacaatcccggagggagattaccagtgacatggtatcctcagagctttgtgaatatacagatgacagacatgagaatgcggtctgcaactggatatcctggaaggacttacaaattctataaaggacctaaagtgtatgagtttggtcatggtcttagctactcagcttactcttaccggttcaagactctggctgaaaccaatctctacttgaaccaatctaaagctcaaaccaactcggactctgttcgatacactctggtttcggaaatggggaaagaaggttgcgatgtagccaagactaaggtcactgtagaggtggaaaatcaaggggagatggcagggaaacatccggtgctgatgtttgcgaggcacgagcgaggaggagaagacggtaaacgagcagagaaacagcttgttgggtttaagagcattgtgttaagcaatggagagaaagcagagatggagtttgagattggtctttgtgagcatttgagcagagctaatgaatttggagtaatggttcttgaagaaggaaagtatttcttaaccgttggagattcagagctccctcttattgttaatgtctga

SEQ ID NO: 20 - protein, 767 aa, Arabidopsis thaliana
MAKQLLLLLLLFIVHGVESAPPPHSCDPSNPTTKLYQFCRTDLPIGKRARDLVSRLTIDEKISQLVNTAPGIPRLGVPAYEWWSEALHGVAYAGPGIRFNGTVKAATSFPQVILTAASFDSYEWFRIAQVIGKEARGVYNAGQANGMTFWAPNINIFRDPRWGRGQETPGEDPMMTGTYAVAYVRGLQGDSFDGRKTLSNHLQASACCKHFTAYDLDRWKGITRYVFNAQVSLADLAETYQPPFKKCIEEGRASGIMCAYNRVNGIPSCADPNLLTRTARGQWAFRGYITSDCDAVSIIYDAQGYAKSPEDAVADVLKAGMDVNCGSYLQKHTKSALQQKKVSETDIDRALLNLFSVRIRLGLFNGDPTKLPYGNISPNEVCSPAHQALALDAARNGIVLLKNNLKLLPFSKRSVSSLAVIGPNAHVVKTLLGNYAGPPCKTVTPLDALRSYVKNAVYHQGCDSVACSNAAIDQAVAIAKNADHVVLIMGLDQTQEKEDFDRVDLSLPGKQQELITSVANAAKKPVVLVLICGGPVDISFAANNNKIGSIIWAGYPGEAGGIAISEIIFGDHNPGGRLPVTWYPQSFVNIQMTDMRMRSATGYPGRTYKFYKGPKVYEFGHGLSYSAYSYRFKTLAETNLYLNQSKAQTNSDSVRYTLVSEMGKEGCDVAKTKVTVEVENQGEMAGKHPVLMFARHERGGEDGKRAEKQLVGFKSIVLSNGEKAEMEFEIGLCEHLSRANEFGVMVLEEGKYFLTVGDSELPLIVNV

SEQ ID NO: 21 - DNA, 1512 bp, Arabidopsis thaliana
  CDS (1)..(1512)
atgagcaatattcaagaaatggaaatgatattgagtatctctttgtgcttaacgaccctcataacccttctcttgctgaggcgattcctcaaacgaaccgccactaaagtgaacctaccaccatctccatggaggcttccggtgatcggaaacctccaccagctgagcctccatcctcaccgttccctccggtccctcagtctcaggtacggaccactcatgctccttcattttggccgtgtccctatactcgtagtctcctccggtgaagcagctcaagaggtattgaaaacacatgatcataaatttgcgaaccgcccgagatcaaaagccgttcatgggcttatgaatggtggacgtgatgttgtgtttgctccctatggagaatactggagacagatgaagagtgtatgcattctcaatctgctcaccaacaaaatggttgaatcctttgagaaggtaagagaagacgaggtaaatgcaatgatcgagaagctggagaaagcaagttcttcttcttcatcagaaaatctgagcgaactctttataactctaccaagcgatgttacgagtagagttgcgttgggaagaaaacatagcgaggacgagaccgcaagggatctcaagaagcgagtgaggcagatcatggagcttttaggcgagttcccgatcggggaatatgtccccatattggcatggatagatgggatccgtggtttcaataataaaattaaggaagtgagtcgagggtttagcgatcttatggacaaagtggtgcaagaacatttagaggcgagtaacgataaagcggatttcgtggatatattgttatcaatcgaaaaagataagaacagtggattccaagttcaaagaaacgacataaaatttatgatcttggatatgtttatcggaggaacgtcaacaacttcgactctactagaatggacgatgacggaactgatcagaagtccaaagagtatgaagaaactccaagacgagattcggtcaactattaggccacatggttcatacataaaagaaaaagaagtggaaaatatgaaatacttaaaagccgtgattaaagaggtgcttcggttgcatccttctcttccaatgatacttcccagactcttaagtgaagatgtcaaagtaaagggatataacatagccgcagggacagaggtgataatcaatgcttgggcgatccaacgagacactgcgatatggggaccggatgctgaagaattcaaaccggagagacacttagattcaggtttagattatcacggaaaaaatctgaactacatcccattcggatcagggagaaggatatgccccgggataaatcttgctttgggtctggcagaggtgacagtggccaaccttgtaggccgatttgactggagggtagaggctggaccaaatggggatcaacctgatctaactgaagccattggtatcgatgtttgccgcaaattccctctcattgcatttccatcttcggttgtgtaa

SEQ ID NO: 22 - protein, 503 aa, Arabidopsis thaliana
MSNIQEMEMILSISLCLTTLITLLLLRRFLKRTATKVNLPPSPWRLPVIGNLHQLSLHPHRSLRSLSLRYGPLMLLHFGRVPILVVSSGEAAQEVLKTHDHKFANRPRSKAVHGLMNGGRDVVFAPYGEYWRQMKSVCILNLLTNKMVESFEKVREDEVNAMIEKLEKASSSSSSENLSELFITLPSDVTSRVALGRKHSEDETARDLKKRVRQIMELLGEFPIGEYVPILAWIDGIRGFNNKIKEVSRGFSDLMDKVVQEHLEASNDKADFVDILLSIEKDKNSGFQVQRNDIKFMILDMFIGGTSTTSTLLEWTMTELIRSPKSMKKLQDEIRSTIRPHGSYIKEKEVENMKYLKAVIKEVLRLHPSLPMILPRLLSEDVKVKGYNIAAGTEVIINAWAIQRDTAIWGPDAEEFKPERHLDSGLDYHGKNLNYIPFGSGRRICPGINLALGLAEVTVANLVGRFDWRVEAGPNGDQPDLTEAIGIDVCRKFPLIAFPSSVV

SEQ ID NO: 23 - DNA, 1359 bp, Arabidopsis thaliana
  CDS (1)..(1359)
atggcatcaaattttgtgaaactcggcagtcaatttatcggcaaactcacccgagtaactagcttaccagctcatcacactgatttggtccaaagagtttcgattttaaaagacgagcttttaacgattggtaacagtaaggagaagttccaaaatgttttggatcagaaagggcaatggttgtttagaacttatcgtgatggtgctgggatcttagagcttatggatcaactctttcctcgtcattacttagctcttcaggttttagagtggaggagaggacaaaaggattattgtatccccttgacatcggaggagtatgctaaaggaatcaaaattgcgggtagagctagggatattaaccttgcagtctatcttttcgatgaggcggctaagaaacgaatgcagactgcttcagtttataattctttgatgagtgtttacatgtggaacgggcttgctgaggaatgtcagtcgctttttaaagatttcaggaggcaaacgcattgtgcgccgaccgttgtgacatataatattctagtatctgtttatggtcgacttttgatggtaaagaatatggaagcagcttttgaagagttacaaaaagtgaagcttcctcctaattctgtcacttacaactttctaattgcgggttacatgactgcctggaattgggataaaatggaagctacttttcaagaaatgaagaggggtccagttgagcctgacacagatacttatcagctaatgcttcgtgggtatgcaaattctgggaatttgaataggatggaagaaatgtatgaagtgattaaagatcaggttggtgtaaacagtggtcctttggtcagagctatgatctgtgcatattgtaagaaagctgttgaggatagagtccaaaagattgaaaatttattgagtcttctctctggggaggaatatcttccttggttgaatgtgcttttgattcgactatatgctcaagaagactttgtggaagcaatggagagtaaaatcaacgaggcatttgagcagaagacatgtgttaataagtcaagtatcatgcgagcaatcattgcagcttacttcaggtgtaatgaagttgacaatcttgctaatttcgtcaagcgtgctgagtctgctgggtggaaactatgcagatctctctaccactgtaagatcatgatgtatggatcccaaaaacgctttgaagaaatggaaggtgttgtaaatgagatggcagagaccaattatgggcttgtaactaaaacgttcgccattatgattaaagcttataaaaaccatggaatggagtcagatgctgagaaagtgaagggaaagatgctgaaacgtgggctttag

SEQ ID NO: 24 - protein, 452 aa, Arabidopsis thaliana
MASNFVKLGSQFIGKLTRVTSLPAHHTDLVQRVSILKDELLTIGNSKEKFQNVLDQKGQWLFRTYRDGAGILELMDQLFPRHYLALQVLEWRRGQKDYCIPLTSEEYAKGIKIAGRARDINLAVYLFDEAAKKRMQTASVYNSLMSVYMWNGLAEECQSLFKDFRRQTHCAPTVVTYNILVSVYGRLLMVKNMEAAFEELQKVKLPPNSVTYNFLIAGYMTAWNWDKMEATFQEMKRGPVEPDTDTYQLMLRGYANSGNLNRMEEMYEVIKDQVGVNSGPLVRAMICAYCKKAVEDRVQKIENLLSLLSGEEYLPWLNVLLIRLYAQEDFVEAMESKINEAFEQKTCVNKSSIMRAIIAAYFRCNEVDNLANFVKRAESAGWKLCRSLYHCKIMMYGSQKRFEEMEGVVNEMAETNYGLVTKTFAIMIKAYKNHGMESDAEKVKGKMLKRGL

SEQ ID NO: 25 - DNA, 1875 bp, Arabidopsis thaliana
  CDS (1)..(1875)
atggaagaaattggaggagctgaagcagtgataaatctcaaatctggatattcgctaccaatttcttatcacccatgttttgggcctcacgaggatctacttcttcttgaagctgatgacaaactcgtctctgatatctttcatcaaaggtacgattttgaagcttttggggtaacattgagaggacttcctgatgaagatgctgttctttgcaccaagtctaagacttatgctatcaaatttgttggtaattctaattccatgttccttattcctccttcaatttttcctggagatgcacaagtttctgataccaacaacaatgtatcggttctcaaaatcgctcctggtaatatggaacttgttgaggcttctcctaggcttgataaacttaagcagattctcttggcaaatccttttggtgctggtgaagttgaagctatgatggatgttgataatgatgacttagaccatagtgggaagaaagatctagcgttgtacacttggagcgatttggttaacacggttcaagcgagtgatgaggagttacgcaatggcttgcagagtctttctgctattgagattgatggtttctggagggttatagatgagaattacctagacgtgattctgagaatgcttcttcataactgtgtattgaaagattggtcatttgatgatcttgatgaagatgaagttgtgaatgctttggtagctgatgagtttcctagtcaactagcgagtcactgcttgcgtgtgtttggctctaaagttaatgaaactgataagtggaagttggaaccgaggcttgtgtgtttgcactttgctagacagatactgagagaagaaaagatgagactagagagtttcatggaagagtggaagaagaagataccagatgggatggaagaaagattcgagatgcttgaaggagaggttttaacagagaaaatcgggatcgagacacgggtctatacgtttagtgtgcgctctctgccttcaactccagaagaaaggttttcagtactctttaaacatagatcaaaatgggaatggaaagacttagagccttacctaagattcgcttgtttcctcgcgagccgttcttggcgtcgttaccgtacattcacggtccaacatcgccggagatggagaaaaaccgcggcggaggaaaaacattcatcaccgtattgtacgatttgtctcgaagatgcggcggagggagagaagatgaggcggataacggcgtgcagtcactgtttccacgtcgattgcatcgatccgtggttgatgaagaagtccacgtgtccattgtgcagagctgagataccgccggtgccgccgggaaatcctctggtggcgctttttgttcctcccggcgtgattgagatgttcaccaaaggaatcatccccgacgcattattaattttctcgagaatgtttgttgaaactgtgattcaactctctcagttcattgccgaatccgtcattatcgtctctgtagccgtcttcactctccgtctcttctatagattcgcttgtttcctcgcgagccgttcttggcgtcgttaccgtacattcacggtccatcatcgccggagatggagaaaaaccacagccgaggaaaaacattcatcaccgtattgtacgatttgtctcgaaaatgcgacggagggagaaaagatgaggcggatagcagcatgcagtcactgtttccacgtcgattgcattgatccgtggttggagaagaagtccatgtgtcctttgtgtagagctgagatcccgccggtcccgccgggaaatcctctgcgcgcgctttttattcctcccggcgtgattgagatgttcaccaaaggaatcgactccgacgcgtag

SEQ ID NO: 26 - protein, 624 aa, Arabidopsis thaliana
MEEIGGAEAVINLKSGYSLPISYHPCFGPHEDLLLLEADDKLVSDIFHQRYDFEAFGVTLRGLPDEDAVLCTKSKTYAIKFVGNSNSMFLIPPSIFPGDAQVSDTNNNVSVLKIAPGNMELVEASPRLDKLKQILLANPFGAGEVEAMMDVDNDDLDHSGKKDLALYTWSDLVNTVQASDEELRNGLQSLSAIEIDGFWRVIDENYLDVILRMLLHNCVLKDWSFDDLDEDEVVNALVADEFPSQLASHCLRVFGSKVNETDKWKLEPRLVCLHFARQILREEKMRLESFMEEWKKKIPDGMEERFEMLEGEVLTEKIGIETRVYTFSVRSLPSTPEERFSVLFKHRSKWEWKDLEPYLRFACFLASRSWRRYRTFTVQHRRRWRKTAAEEKHSSPYCTICLEDAAEGEKMRRITACSHCFHVDCIDPWLMKKSTCPLCRAEIPPVPPGNPLVALFVPPGVIEMFTKGIIPDALLIFSRMFVETVIQLSQFIAESVIIVSVAVFTLRLFYRFACFLASRSWRRYRTFTVHHRRRWRKTTAEEKHSSPYCTICLENATEGEKMRRIAACSHCFHVDCIDPWLEKKSMCPLCRAEIPPVPPGNPLRALFIPPGVIEMFTKGIDSDA

SEQ ID NO: 27 - DNA, 1074 bp, Arabidopsis thaliana
  CDS (1)..(1074)
atggaggaaacaaaaatgagtttgcttgatgattcttttacaagtgcaatgacacttaccaattcaggtgtgcctcaagtccctgatcgctacgttcttcctccttcgcaaaggccagctcttggttcaagcttaggcaccagcgagactacacttcctgtcattgatctctctcttttgcaccaacctttccttcgatccctcgcaatccacgagattagcatggcctgcaaggagtttggtttctttcaggttataaaccatggaataccatcatcagtggttaacgatgccttagatgcagcaacacagttcttcgacttacctgtggaagagaagatgcttctggtgtctgcaaacgttcatgagccagtcaggtatggcacaagccttaaccattcaacagacagagttcactactggagagatttcatcaagcattactctcatccactctcaaagtggatcgatatgtggccatcaaatcctccatgctacaaggataaagtgggcaagtatgcagaggcaacacatttgctacacaagcagttaatagaagctatctcagaaagcctgggactggagaaaaattacttacaagaagagatagaagaaggctcacaagtcatggcagtgaattgttatccagcatgcccggaacctgaaatggccttgggaatgccaccacactcagacttcagctcactgaccatcttacttcagagtagcaagggactccagataatggactgcaacaaaaactgggtttgtgtgccgtatatagaaggagctttgatagttcagctgggagatcaggtagaggtgatgagcaacggcatatacaagagcgtcattcatcgtgtaacagtgaacaaagaagtcaaaaggctatcttttgcaagtcttcacagtctacctctgcacaagaaaataagtccagcaccaaaactcgtcaacccaaacaatgcaccagcctatggagagtttagtttcaacgattttctgaactacatctcaagcaacgattttatacaagaaagattcattgacacaataaagaaaagcagttcctaa

SEQ ID NO: 28 - protein, 357 aa, Arabidopsis thaliana
MEETKMSLLDDSFTSAMTLTNSGVPQVPDRYVLPPSQRPALGSSLGTSETTLPVIDLSLLHQPFLRSLAIHEISMACKEFGFFQVINHGIPSSVVNDALDAATQFFDLPVEEKMLLVSANVHEPVRYGTSLNHSTDRVHYWRDFIKHYSHPLSKWIDMWPSNPPCYKDKVGKYAEATHLLHKQLIEAISESLGLEKNYLQEEIEEGSQVMAVNCYPACPEPEMALGMPPHSDFSSLTILLQSSKGLQIMDCNKNWVCVPYIEGALIVQLGDQVEVMSNGIYKSVIHRVTVNKEVKRLSFASLHSLPLHKKISPAPKLVNPNNAPAYGEFSFNDFLNYISSNDFIQERFIDTIKKSSS

SEQ ID NO: 29 - DNA, 1074 bp, Arabidopsis thaliana
  CDS (1)..(1074)
atggagtatcaggggcttcaaaattgggacggtcttttagacccattggacgacaatctccggcgagagattctccggtacggtcaatttgtcgaatcggcttatcaagcatttgatttcgatccttcctctccaacctacgggacatgccggtttccgaggagcacgttgttagagcgatccggtttacccaactccggttatcgactaacgaagaaccttcgtgccacgtcaggtattaacttgccacgttggattgagaaagcgccaagctggatggctacacaatctagctggattggttacgtggcagtttgccaggacaaagaagagatctcgcggcttgggcgtagagacgtcgtcatctccttccgtggaaccgccacgtgtctcgagtggttagagaaccttcgcgccacgctgactcatctccctaatgggcctactggagcaaatctaaacgggtctaactctgggcccatggttgagagcgggtttttaagcttgtatacttcaggtgttcacagtttgagagacatggtaagagaagagatcgcaaggctactccaatcttacggcgacgagccgttaagtgtaacgataaccggtcacagcctcggcgctgcgatcgcgacactagcagcttacgatatcaaaacgacgtttaaacgtgcgcctatggttaccgtaatatctttcggaggtccacgtgtcggaaacagatgctttcggaaactccttgagaagcaaggcacgaaggttctaagaatcgtgaactccgacgacgtcatcaccaaagttcctggagttgttttagaaaacagagagcaagataacgttaagatgacagcgtcgataatgccgagctggatacagagacgcgtggaggagacgccgtgggtttacgctgaaatcggtaaggagcttcggctgagtagccgtgactcgccgcacttgagcagcatcaatgtggccacgtgtcatgagctgaaaacgtatttacatttggtagacgggtttgtgagctccacgtgtccattcagagaaacagctcggagagttctccatagatga

SEQ ID NO: 30 - protein, 357 aa, Arabidopsis thaliana
MEYQGLQNWDGLLDPLDDNLRREILRYGQFVESAYQAFDFDPSSPTYGTCRFPRSTLLERSGLPNSGYRLTKNLRATSGINLPRWIEKAPSWMATQSSWIGYVAVCQDKEEISRLGRRDVVISFRGTATCLEWLENLRATLTHLPNGPTGANLNGSNSGPMVESGFLSLYTSGVHSLRDMVREEIARLLQSYGDEPLSVTITGHSLGAAIATLAAYDIKTTFKRAPMVTVISFGGPRVGNRCFRKLLEKQGTKVLRIVNSDDVITKVPGVVLENREQDNVKMTASIMPSWIQRRVEETPWVYAEIGKELRLSSRDSPHLSSINVATCHELKTYLHLVDGFVSSTCPFRETARRVLHR

SEQ ID NO: 31 - DNA, 597 bp, Arabidopsis thaliana
  CDS (1)..(597)
atggagaaacaagaagaagaagatgtgaagagaagacaaagacaaaaagcagcaaccagcctcgggttcttacattgggaagagctaaaaaatcatggagatttatccaaggtagctttgaacattgcccttactaccctcgtggacgatgcatcaacggggttctgtattatgaatctggtgaatttgatcgtgctcagggaaagttcccaaggttacctcttaacttacgagggaaagttagcttctcttgcttctgcaacctatgtgaaagcctttatttcactatgggttctggaggatgcagagagacatgcgtggtcgtttagaacattttctttaacttttccactcgatgatccaattttggacacctttttagaactaacgggtgtgactgaagccggtgagtttgtttacgcaccaacaactttgcagagtccgtttcatgctctgtatttcgatccacagagaaacagctttagaagagtcatatatgaaggactcgcggacgacgaatttaggcgacgtaatagacttggatacgaacgtcaccatattcttcccaatcacatagagagtctcatttctttgtaa

SEQ ID NO: 32 - protein, 198 aa, Arabidopsis thaliana
MEKQEEEDVKRRQRQKAATSLGFLHWEELKNHGDLSKVALNIALTTLVDDASTGFCIMNLVNLIVLRESSQGYLLTYEGKLASLASATYVKAFISLWVLEDAERHAWSFRTFSLTFPLDDPILDTFLELTGVTEAGEFVYAPTTLQSPFHALYFDPQRNSFRRVIYEGLADDEFRRRNRLGYERHHILPNHIESLISL

SEQ ID NO: 33 - DNA, 5163 bp, Arabidopsis thaliana
  CDS (1)..(5163)
atggcgtttaggcctttcgggaaggacttaggtccgatgagctctaagccagcgccgtttacaccgttcggtgcttcttcaaccactagattgtacctttcttttttattcttacacactgcgaatgttggatttgcttgtagtgattcatcaattcaaccaccggcgtctcaaaaccattcagcctttgcaggacaatcttttggacctggtggaattcgaagtggtccttcaattcagcgagcaccacctctgtcggcttctcaaaaccctcagctctctatagggaaaccttaccgaccaggtggggttcaaagtgttcctccaattaatagaataccatctccgtcggcttttcaaaatccatcaccctcctcaggacaaccttaccaacctggtggaattcaaaggatcccagaacctttcaatggaatagcatggggtccagaagcttcacgtacaagcccctctgtgagaccttaccaatttcctggagttcagaggcctaatttaaatcctcaatatgggcacgatggatcaaggaatttcttgaaagatcatggtgaacatagtcgagccacgtctccacctgctacatctcacattctttccagaatgggaactgatgctgttgagattggtcgatcacaagattcaaaaagaaaaagtcggtcagatattcttcctgaccagaatatggggttttctcgaagaaatcaatcgccagtatcaggttttgagaatggaaacttggtagatggttttcagccactttctagccgaacttggatgcgctctccgtcttctgcggagaataatccggtgaggtcgaggagcaatcccaatcagttgattcatcaagaacaaaccggaaactcgtcattcccctatgcacatgaagtagctgaaattcaggaagctactagaagaaagtcttcggctgtagcaccttctgataaaccccttggagatgaccccatattgtctcaacatgactctcaaaggttttcgacatctccacctacgtcaggcacaaagtcatatacactttcaagaagttcagattctcaatttcctggacagccctcctctgtaaatagtttcaataatgcgcgtaagacaaacagttcacctgcaacaaaaaggacgagatctccacctgtatatccaattgaagaggatatcccgcgaaactctttcccttctcaagattgtacagaaggagaagagcaagccagggcaaagagactggcccgcttcaagggtgaactggagcctattgcagaccgacctgttgatattcaacttactaaatcacctgtaaataaaactatgaagcctctggacaacaaacaaacattcaattcgcttgaatcaagtagggatgccctgaagggagatgccttgcctgattatgaaaactcggagcagccctctcttatcattggagtatgccctgacatgtgtcctgagtcagaacggggggagcgtgagaggaagggtgacttggaccattatgagcgtgtggatggagataggaaccagacaagcaaatcccttgctgtgaagaaatatactaggacggcggagcgagaagcaattttgatacgaccaatgccaatcctgcaaaatacaatggaatatttgctgagtttgctagaccgaccttacaatgaaaactttcttggcatgtacaatttcttatgggataggatgagagctatacgtatggatctaagaatgcaacatattttcaaccaagaagctattactttgctggagcaaatgattagacttcacatcattgcaatgcatgagctatgtgaatatactaaaggagagggcttttcggaggggtttgatgcacacctgaatattgagcagatgaacaagacatctgttgagttgtttcaaatgtatgatgatcacaggaagaaaggaataactgttcctacagaaaaagagtttcgtggctattatgcccttctcaaactcgacaagcatcctggctataaggttgaaccttcagaactttctcttgatcttgccaatatgactccagaaataaggcaaacttcagaagttctctttgcccgcaatgtagccagagcttgcagaactggcaacttcatcgccttctttcgccttgcacggaaagcaagctatcttcaagcatgtctaatgcatgctcatttttcgaaagtaaggctaagaactcaggcgcttgcctctctgcactcgggtctccaaattaatcagggtctcccagtttcagatatgtcaaattggatagggatggaggtatttcttccatcactctgttacttggtgtgtatcccttttttggtttgtcacagagaagttgaagaggacatagaagccctgttggagtaccatgggttttcgataaaggtttttgaagagccatacatggtaaaaaatgacctatttctccatgctgataaggattacaaaacaaaatgctcaaaacttgttcacatgaaaaagtcaagaaccatagtggaagatgtttctgctcccacagtagtggaagatgtttctactccctttccattgccttccttgatcacagaagcaactatcggaaatcaacagtgtattaccgcccataaacacgaaatgccgcctgcgagaagtcttaagaaacaaacatcaatgcgtctatttgataaagaagtggctgactccaagacttccctcttagcagaggaggacaagccaatggggacatttgttatgaatccaccagggccattcgttataaatccagtggtgcatcaagagaaacaaaatgaccttacatcagctggtggatttcattctcccgtgaagctatattctccttttggttcccctaaatttcctcaaactaaatcgtcgaatttggagaaacaacctaatgacgatcgcatcggtatgtctcctggggaaattaaattttcaatcataggggatgtatatacgaatcatgtgcctggaccagctttgcaacaaagtccgaagtctatgccaatggagattatgcctgtaactaccattgcagagtgtccgacaagtgtagaaaacaaatatgctttggaagaatcagtaccggaggctgcaatgatttgtaccttggaaaaggagttcaatgacattgacgaggaagacgaggatgaggatggggtcatcttaaatcagtatgatgaggaagtggcgaaagcaaaactcaagttgatcataagattatggaagcggtggtcttcacgtcaaagtgaattgcgggagcgtcgacagttagcagcagctgctgcactgaattcactatccctgggtactcctatccgatttagcaaaactgatcaatcgagggcgtgtggtgagtttaacattgatcaagccatgaggaggagatttgaagaacgtgagaaatcatggtcaaggctgaatatttctgatgtgatagctgatatactagttggaaggaatccagaatcaaaatgcataagctggaaggtcgtcttatgtactcagactaaatcagtaaactcatcatcttctgcaagtcaggttacgcattcagcagccagtcgatggttatcatcaaagcttatgcctcatgcagaacatagtagtctcaacgatgataatctgctgttttcagctcccggcgtgtctgtatggaacaaatgggttgcaaatgggtctgatatagatttcacatgctgtctctcagtagctagggatgtggaggctgagaatgatatgtgtgaaacaacatgtggtgcaagtgcagtccttttccttgcatctggaggcctccctttgaatcttcagagagaacagcttaacctcattcttgaatcagtacccaacggttcagttcttccccttctcgtagtaattagctcatgcaatggggaacacatggagcctgataccgacattgtctcgggattaggcctccatgatattgacaagtcaaagatagcaagcttttccatcgtttctattgctaataagtcccaaaaggggcaggaagttcattttttcaatgattcacggctaagagatgggtttaaatggctagcaagcaattcacctctgcaaccaaatcttcatcatgttaaactccgggaactgtttctgacccatttcagtttttccttggagttgcttaagcagatgccagatcaggaggttggtcctaacatctgcatatcagccttcaacgacgcattggaaacatcacgaagaaacatcacttctgctgctgaagcaaatcccatcggttggccttgccctgagacaatgttgctcgaggataatagaaaagaatgtttaatggtcaagcggtatcttcccaacctggactggagcagtgcagagaacgtcgaactactcagttccgtgctagagaattgtaagctcccagattttgaagatgatttgacatggctaaccgtaggatgtgcttctggtgctgagatagagaaccacacgcaaaggcttgagggatgcttaattgagtacttaacacagagaagcaatcttatgggagtctcattagctactaaagaaacaggagtgatgctagaaagaaacactagactcgaactccataactcaagccgctaccatatcaccccgagatggattggtatcttccagaggatcttcaactggcggataatgggtttgtttgatgcatcatcttcctcagcttacgtactgaagtctgatctcaacatgtcaacttcaagctatgcagataaattcttggctgaagatgcatcatacccatcttgtcctccaaatcttccattgcttcatgaaatgatagaaatcagctgcagccccttgaagtcgcctcctccatatgatgacaaagcccagagagttgttgagacaggaatgctcatcgatgatcatagagatatagaggaatcgatgttggaaaagaacagagaagcttgtcgaggtattgatctgatgataactgaggatgatgagttaggcgagagatcatggagaagtaaaggtagagaagcggcagagaagaagacgatagagaagagagagagtgagagattagatgaattgttggaaaaatgtaacatggtacagaatagcatagccgagaagctctgtatttacttctga

SEQ ID NO: 34 - protein, 1720 aa, Arabidopsis thaliana
MAFRPFGKDLGPMSSKPAPFTPFGASSTTRLYLSFLFLHTANVGFACSDSSIQPPASQNHSAFAGQSFGPGGIRSGPSIQRAPPLSASQNPQLSIGKPYRPGGVQSVPPINRIPSPSAFQNPSPSSGQPYQPGGIQRIPEPFNGIAWGPEASRTSPSVRPYQFPGVQRPNLNPQYGHDGSRNFLKDHGEHSRATSPPATSHILSRMGTDAVEIGRSQDSKRKSRSDILPDQNMGFSRRNQSPVSGFENGNLVDGFQPLSSRTWMRSPSSAENNPVRSRSNPNQLIHQEQTGNSSFPYAHEVAEIQEATRRKSSAVAPSDKPLGDDPILSQHDSQRFSTSPPTSGTKSYTLSRSSDSQFPGQPSSVNSFNNARKTNSSPATKRTRSPPVYPIEEDIPRNSFPSQDCTEGEEQARAKRLARFKGELEPIADRPVDIQLTKSPVNKTMKPLDNKQTFNSLESSRDALKGDALPDYENSEQPSLIIGVCPDMCPESERGERERKGDLDHYERVDGDRNQTSKSLAVKKYTRTAEREAILIRPMPILQNTMEYLLSLLDRPYNENFLGMYNFLWDRMRAIRMDLRMQHIFNQEAITLLEQMIRLHIIAMHELCEYTKGEGFSEGFDAHLNIEQMNKTSVELFQMYDDHRKKGITVPTEKEFRGYYALLKLDKHPGYKVEPSELSLDLANMTPEIRQTSEVLFARNVARACRTGNFIAFFRLARKASYLQACLMHAHFSKVRLRTQALASLHSGLQINQGLPVSDMSNWIGMEVFLPSLCYLVCIPFLVCHREVEEDIEALLEYHGFSIKVFEEPYMVKNDLFLHADKDYKTKCSKLVHMKKSRTIVEDVSAPTVVEDVSTPFPLPSLITEATIGNQQCITAHKHEMPPARSLKKQTSMRLFDKEVADSKTSLLAEEDKPMGTFVMNPPGPFVINPVVHQEKQNDLTSAGGFHSPVKLYSPFGSPKFPQTKSSNLEKQPNDDRIGMSPGEIKFSIIGDVYTNHVPGPALQQSPKSMPMEIMPVTTIAECPTSVENKYALEESVPEAAMICTLEKEFNDIDEEDEDEDGVILNQYDEEVAKAKLKLIIRLWKRWSSRQSELRERRQLAAAAALNSLSLGTPIRFSKTDQSRACGEFNIDQAMRRRFEEREKSWSRLNISDVIADILVGRNPESKCISWKVVLCTQTKSVNSSSSASQVTHSAASRWLSSKLMPHAEHSSLNDDNLLFSAPGVSVWNKWVANGSDIDFTCCLSVARDVEAENDMCETTCGASAVLFLASGGLPLNLQREQLNLILESVPNGSVLPLLVVISSCNGEHMEPDTDIVSGLGLHDIDKSKIASFSIVSIANKSQKGQEVHFFNDSRLRDGFKWLASNSPLQPNLHHVKLRELFLTHFSFSLELLKQMPDQEVGPNICISAFNDALETSRRNITSAAEANPIGWPCPETMLLEDNRKECLMVKRYLPNLDWSSAENVELLSSVLENCKLPDFEDDLTWLTVGCASGAEIENHTQRLEGCLIEYLTQRSNLMGVSLATKETGVMLERNTRLELHNSSRYHITPRWIGIFQRIFNWRIMGLFDASSSSAYVLKSDLNMSTSSYADKFLAEDASYPSCPPNLPLLHEMIEISCSPLKSPPPYDDKAQRVVETGMLIDDHRDIEESMLEKNREACRGIDLMITEDDELGERSWRSKGREAAEKKTIEKRESERLDELLEKCNMVQNSIAEKLCIYF

SEQ ID NO: 35 - DNA, 1719 bp, Arabidopsis thaliana
  CDS (1)..(1719)
atggtgagaacaagattggcgatatctgttgttcttgtgtcgacattgttgttgttgaatgtgaaagcgaagagcgttgatccttacaaggttcttggagtatctaaggatgcaaagcagcgtgaaatccagaaagctttccacaagcaatctctgaaatatcatccagataaaaacaaagataagggtgctcaggagaagtttgctgagattaataatgcgtatgagatcttatctgatgaagagaagaggaaaaactatgatctttatggagatgagaaaggacagcctggatttgattcggggtttcccggaggtaatggtgggtattcttactcctcaagtggtggtggtttcaactttggagggcctggtggttggcaaaatatgggcggtgggggaggttccaaatcgttttctttctcgtttggcggtcctagtgaaagctcctttggttttggtatggatgatatcttttccatgttttcgggcggtagttctaaaggaaaggagcagtttggtggctttggtagctcatcgaatgctgaatctaaatcaaagagcagtactgtagcagctatcaaaaccattaactctcaggtctataagaaggacgttgtggaccaagggatgacttggcttttgttgtcgtatcttccatctcagaggggaagccagtaccatgaatccatcatagaggaagttgctgagtcgttgcaaggagctttaaaggttgggcgattaaattgtgaaacagaatcctctctttgcaaacaactaggcatagttcctcgtagggctccaaggatgtttgtttattcatacacatcaagtggcaaagctaccttagcagaatatactgaagagcttgttgcaaagaaggtgaaaagcttctgccaggaacatctaccgagattctcaaaaaagattgatctgaatacattcgatgtatctgccgttagctcacaaaagactcctaaagttttgcttctgtcaacaaagaaagacactcctgtcatctggcgggttctaagtggcttgtacaatggacgatttgtcttttacaacacagaggtccatgatacttctgatccaaagatacaaaagttgggggtagacaagtttccggcaatagttggttggttatcgaatggggagaagcaagtcttgaaaacaggtatcactgtgaaaaatctgaaatcagctgtccaggaacttggtaaattgcttgaaggattagagaagaagaacaagaaggtctcttctaagagtcaggcgggccaagcccctaacgagtcctcagaaaagatacctcttctgtcaagaccaaattttgactccatttgtggggagaacactcctgtttgtatcattggtgccttcagatcgtcaaatggtaaagagaagctgcagtcaataatgtccaaggtatcccagaaatcactctctcgacgacaagcttcaaccacaggttctcaggacacagtatcctattcgcttctagacgcaacaaaacaatctgcgttcttgagctcccttgacaaatcagagttcaaaacttcttctgataagctcctaatagcttacaagcctcgacgaggtaagtttgctacattcaaaggcgatatgactattgaggaagttgagaaattcgtagcagctgttcttaacggagacatacagttcacaaagacaagacagaaaccccagatcaaatga

SEQ ID NO: 36 - protein, 572 aa, Arabidopsis thaliana
MVRTRLAISVVLVSTLLLLNVKAKSVDPYKVLGVSKDAKQREIQKAFHKQSLKYHPDKNKDKGAQEKFAEINNAYEILSDEEKRKNYDLYGDEKGQPGFDSGFPGGNGGYSYSSSGGGFNFGGPGGWQNMGGGGGSKSFSFSFGGPSESSFGFGMDDIFSMFSGGSSKGKEQFGGFGSSSNAESKSKSSTVAAIKTINSQVYKKDVVDQGMTWLLLSYLPSQRGSQYHESIIEEVAESLQGALKVGRLNCETESSLCKQLGIVPRRAPRMFVYSYTSSGKATLAEYTEELVAKKVKSFCQEHLPRFSKKIDLNTFDVSAVSSQKTPKVLLLSTKKDTPVIWRVLSGLYNGRFVFYNTEVHDTSDPKIQKLGVDKFPAIVGWLSNGEKQVLKTGITVKNLKSAVQELGKLLEGLEKKNKKVSSKSQAGQAPNESSEKIPLLSRPNFDSICGENTPVCIIGAFRSSNGKEKLQSIMSKVSQKSLSRRQASTTGSQDTVSYSLLDATKQSAFLSSLDKSEFKTSSDKLLIAYKPRRGKFATFKGDMTIEEVEKFVAAVLNGDIQFTKTRQKPQIK

SEQ ID NO: 37 - DNA, 465 bp, Arabidopsis thaliana
  CDS (1)..(465)
atgggaatccagaatattttatggcaagtggcgaagaaatcattcactggaagtattatagggcttaccatttcagatagatgttgtagcgttgttccagtgagaggagattccatgtctcccacatttaatccccagcggaattcttatttagatgattatgtacttgtggacaaattttgccttaaggattacaagtttgcgcgtggtgatgttgtagtgttcagctctccgacacatttcggagatagatacataaagaggatagtcgggatgcctggtgaatggataagtagttctcgggatgtgatcagagtcccagaaggtcattgttgggtagaaggagataacaaaacttccagcttagactcaagatcctttggccctattcctttgggtttaattcaaggaagggtcactcgtgtcatgtggcctcctcaaagaataagcaagatcggtcgataa

SEQ ID NO: 38 - protein, 154 aa, Arabidopsis thaliana
MGIQNILWQVAKKSFTGSIIGLTISDRCCSVVPVRGDSMSPTFNPQRNSYLDDYVLVDKFCLKDYKFARGDVVVFSSPTHFGDRYIKRIVGMPGEWISSSRDVIRVPEGHCWVEGDNKTSSLDSRSFGPIPLGLIQGRVTRVMWPPQRISKIGR

SEQ ID NO: 39 - DNA, 1662 bp, Arabidopsis thaliana
  CDS (1)..(1662)
atgtcagagggcagagaaacttgcgaagaatctacgagtggtgaatcttttccatatagatttcaacttgaagaggatgtaaaaagattgcaactgcaactccaacaagaaatagatttgcatacatttctagagagtgtcatggagaaagatccttgggagctatcttattcttctagtgttccacatcctgctcaggaacttctctccaatatagtgacgctagagactgcagtcactaagctcgagcaagaaatgatgtcactgaatttccaacttagccaagagagaaacgagaggagactcgcggaataccagttgacacattcggcttctccactaaattcttcttcttccctaagatatttgaatcagtcagattctgaattacatcaatcagcagaagacagtccatctcaagaccaaatagtccattaccaagaatcttcatctgaatcatctccagcagagtcaactgttgagcaaacactggacccaagtaatgactttcttgaaaagaggctaatgagaaagacaaatgcgaggaagctacctcgaggaatgccacctaagtacctgtgggatcaacctaatctattatctgaagaaatggtgagatgtatgaagaatatcttcatgtctcttgctgatccaacagcaacttcaaaagcttcctcaaacgaaagccacctctcaccagtatcacctcgcgggcatctatcaagctcagcatcctggtggccttcaacagaacggtcaatgatctcctcatgggtgcaaagcccacaaatagatatccaaaataacgccaatgttttggccacaggagatgtctttgatccttatagagttcgtgggaagttaagctgggcggagattgggaactacagtttggcatccgaggtttcttggatgtctgtagggaagaaacagctggagtatgcttccggggcattgaagaagttcaggacactggttgagcaattggctagagtaaatcctattcatttaagctgcaacgagaagcttgctttctggattaacctttataacgcgttgataatgcatgcttatttggcttatggcgtcccaaaaagcgacctgaagcttttctcgttgatgcaaaaggcagcctatacagttggagggcactcatatactgcggcgacaatggaatatgtgatactgaagatgaaaccgcctatgcacaggccacaaattgctttgcttcttgccatccacaagatgaaagtatcagaagaacagcgcagggcaagcattgatacacatgaacctcttctcggctttgctctaagctgtggaatgtactcttcacctgcggtgaggatctactctgcgaaaggagtgaaggaagagatgctagaagcacaaagggacttcatacaagcatcggtagggctgagcagcaaagggaagctcttactacccaaaatgctccattgttatgccaagagtttggtggaggattcgaacttgggggtctggatatcaaggtaccttcctccacatcaagctgcttttgtggagcaatgcatctctcagagaagacaaagccttctcgcttcacggaactgcggaatactccccttcgattctcgtttcagatacctgtttctccccgacgacaacacctcgttgtaa

SEQ ID NO: 40 - protein, 553 aa, Arabidopsis thaliana
MSEGRETCEESTSGESFPYRFQLEEDVKRLQLQLQQEIDLHTFLESVMEKDPWELSYSSSVPHPAQELLSNIVTLETAVTKLEQEMMSLNFQLSQERNERRLAEYQLTHSASPLNSSSSLRYLNQSDSELHQSAEDSPSQDQIVHYQESSSESSPAESTVEQTLDPSNDFLEKRLMRKTNARKLPRGMPPKYLWDQPNLLSEEMVRCMKNIFMSLADPTATSKASSNESHLSPVSPRGHLSSSASWWPSTERSMISSWVQSPQIDIQNNANVLATGDVFDPYRVRGKLSWAEIGNYSLASEVSWMSVGKKQLEYASGALKKFRTLVEQLARVNPIHLSCNEKLAFWINLYNALIMHAYLAYGVPKSDLKLFSLMQKAAYTVGGHSYTAATMEYVILKMKPPMHRPQIALLLAIHKMKVSEEQRRASIDTHEPLLGFALSCGMYSSPAVRIYSAKGVKEEMLEAQRDFIQASVGLSSKGKLLLPKMLHCYAKSLVEDSNLGVWISRYLPPHQAAFVEQCISQRRQSLLASRNCGILPFDSRFRYLFLPDDNTSL

SEQ ID NO: 41 - DNA, 936 bp, Arabidopsis thaliana
  CDS (1)..(936)
atggatacaggaaataataatgacatccccactcttcttaagtccaattttcctccctatggtcgagattttcctggtgctattcctaccggtagattttcagacgggaaagttccatcggacatcattgcggaatcgttaggaatagcaaaaacactaccaccatatttaggctcgaatctaaagccacatgatcttctaaaaggtgtaatctttgcttctggaggttccggttatgatccattaacatctacattactgtctgtagtatcaatgtcagaccaactaaagtattttcaagaatacctagcaaaaattaagcaacactttggagaagaaaaagttaagttcatattggagaaaagtgtgtttcttgtggtctctagcagtaatgatctcgctgagacttattgggttcgatcggtcgaatatgatcgtaactcatatgctgaatatctggttgagttggcttcagagttcatcaaagaattatctgaacttggagctaaaaacattggactgtttagcggagtaccagtagggtgtttacccgcgcaaagaacactttttggaggctttgaaagaaaatgttatgaaaagttgaataacatggcacttcatttcaattcaaagctatcttctagtttggatactctaaagaaagaactgcccagcagactaatatttatcgacgtttacgatactcttctcgatataattaaaaatcctacaaattacggatttaaagtggcagataaaggatgttgtggtacaggaaaaattgagttgatggaattgtgcaataaatttactccttttacatgttcggatgcatcgactcatgtgttcttcgactcttatcatccgagtgaaaaggcatatcagattatcactcataaattgttagcaaaataccgtaaatacctaaacacctga

SEQ ID NO: 42 - protein, 311 aa, Arabidopsis thaliana
MDTGNNNDIPTLLKSNFPPYGRDFPGAIPTGRFSDGKVPSDIIAESLGIAKTLPPYLGSNLKPHDLLKGVIFASGGSGYDPLTSTLLSVVSMSDQLKYFQEYLAKIKQHFGEEKVKFILEKSVFLVVSSSNDLAETYWVRSVEYDRNSYAEYLVELASEFIKELSELGAKNIGLFSGVPVGCLPAQRTLFGGFERKCYEKLNNMALHFNSKLSSSLDTLKKELPSRLIFIDVYDTLLDIIKNPTNYGFKVADKGCCGTGKIELMELCNKFTPFTCSDASTHVFFDSYHPSEKAYQIITHKLLAKYRKYLNT

SEQ ID NO: 43 - DNA, 1431 bp, Arabidopsis thaliana
  CDS (1)..(1431)
atgtctatggagagatctttagaagcttgggaagaggttcaacgacatggacaagacttagctgatcgacttgctcaaggatttacgggtttgattcatataaacccaccttcgtttccatggccgccgaatcaccatcatcttcacaaggcgaaactgttcgatctcgagttcccaactcaacatttcagtgttattaaggattctaggtttagtatcaaccaaccaatcaacggtgtcacagcgattctcgatattgggaataagataggtcaagctggtgttgactttggtgctgggttgaatgtgatggtccaacagttcttcaggaggttgcctataccgttcttacacgaggataataacaagcttgttgtctctgtggatggtgataagagtacaaggagccatagagcttatgtgatcacaaaaggggatttgggaatggctacagaacggttgagggactcagggttttctaagacagatgatactgcttctgttactatgtctgaggaggaagttgcagattcctatcttagagctgctggattgcttggaagatcaaagggaacaattgatacgtcatcaagttatgacagtaggacaaatggtatggaacattcattggcagccagaggagatctctggagggtagaagcttcacattcgagttctactgcaagcgatggaaattcgtctctctttcttctccaacttggaccacttctctttctacgcgattcaactcttcttttaccgttacacttatcaaaacagcacttgctctggtatggatatgataggaagaaaggtatgcattcactctgtccagctatatggtcaaagcatcggaggtggcttatgatgtcaatgctctctctcaatcctttagcttgctcatttatggatttgcaatttccaaacgggcaattgacatatgtatctggcgaaggactgacgacaagtgcttttgtgcctttttgtggtggtcttcttcaagcacagggtcaatatccaggcgacatgagatttagttactcttgtaagaataaatgtggaacccgaatcacaccaatggtacattggcctgataaatcatttgggttggatctttctcaacccttggcttggcgtagatccggactactgatgaaaccgacaattcaagtcagtgtatgtcccacattcggtggaagcaatcccgggattaaggcagaagttattcactcgttgagcgatgacttgaatctgatatgtggctacgcactcaatgcacatccttcagcatttgcctctgtagcttttggtcggtcgaaatggaatggaaacattggacgcacgggaatagttgttagagctgatactccacttgcaagtattggccagccttctttctctatccagcttaataacgctttcgagttctga

SEQ ID NO: 44 - protein, 476 aa, Arabidopsis thaliana
MSMERSLEAWEEVQRHGQDLADRLAQGFTGLIHINPPSFPWPPNHHHLHKAKLFDLEFPTQHFSVIKDSRFSINQPINGVTAILDIGNKIGQAGVDFGAGLNVMVQQFFRRLPIPFLHEDNNKLVVSVDGDKSTRSHRAYVITKGDLGMATERLRDSGFSKTDDTASVTMSEEEVADSYLRAAGLLGRSKGTIDTSSSYDSRTNGMEHSLAARGDLWRVEASHSSSTASDGNSSLFLLQLGPLLFLRDSTLLLPLHLSKQHLLWYGYDRKKGMHSLCPAIWSKHRRWLMMSMLSLNPLACSFMDLQFPNGQLTYVSGEGLTTSAFVPFCGGLLQAQGQYPGDMRFSYSCKNKCGTRITPMVHWPDKSFGLDLSQPLAWRRSGLLMKPTIQVSVCPTFGGSNPGIKAEVIHSLSDDLNLICGYALNAHPSAFASVAFGRSKWNGNIGRTGIVVRADTPLASIGQPSFSIQLNNAFEF

SEQ ID NO: 45 - DNA, 477 bp, Arabidopsis thaliana
  CDS (1)..(477)
atggatcatgatcacatgcatgacatgccaccaccatcaccatcatcatcatcgatgtcgaatcatacaacaccacacatgatgatgatgcacatgaccttcttttggggtaagaacacggaggttctcttctccggatggcccgggacaagctccggcatgtacgctctctgtctcattgttatattcctcctcgccgtaattgccgagtggctcgctcattcaccgatcctacgtgtcagtggctcaaccaatcgagccgccgggctcgctcaaaccgctgtgtacacactcaagactggcctttcgtatttggtgatgctcgctgttatgtcctttaacgcaggtgttttcatcgtcgctatcgccggctatggcgttggtttctttctctttgggagcactactttcaagaaaccctccgatgaccagaaaaccgccgagcttcttccgccgtcttcaggctgcgtttgttga

SEQ ID NO: 46 - protein, 158 aa, Arabidopsis thaliana
MDHDHMHDMPPPSPSSSSMSNHTTPHMMMMHMTFFWGKNTEVLFSGWPGTSSGMYALCLIVIFLLAVIAEWLAHSPILRVSGSTNRAAGLAQTAVYTLKTGLSYLVMLAVMSFNAGVFIVAIAGYGVGFFLFGSTTFKKPSDDQKTAELLPPSSGCVC

SEQ ID NO: 47 - DNA, 744 bp, Arabidopsis thaliana
  CDS (1)..(744)
atgaagactactcctggtttgaggattttcaagcccatcatccctcacacacctaaaccggactctagaatttatgtggaagatgcttggacaatgctaaagccagccataagagccatcttcctcgacgagccacaagattttgcatgcagtgggcttttcaatgctgttaataaatcatggtgtgaaaagtcttcaggagaagccctttacaagctgatcttggaggagtgtgagatatacatctctgcagccatacagtctttagaatcgcaatgcgatacggatccctctcttttcctctcactcttggagaagtgttggctagactttcgccgcaagttacagtttctctgtagcattgccggtggtgaaggtcagaccgtcggtccacactcagtgtgggacttgggtagtgagctttctcccaagcatctcttctcagcccagaaagttcgtgacaagcttctttccatcattctacaactcattagagatcaaagatcattcatgtctgttgacatgactcagctaaagaataccaccagaccagtcatgtctgttcacatgactcagctaaacaatcttaggggtttgttttatggacagtctctctacaagtcgcccttcttcaagaaaccctttatcgactgcgctgttgagttttactcagcagaagcaatgcagttcaaggagcagtcagacattccactgtatttgaaacgtgtcgagtatgtggcgtga

SEQ ID NO: 48 - protein, 247 aa, Arabidopsis thaliana
MKTTPGLRIFKPIIPHTPKPDSRIYVEDAWTMLKPAIRAIFLDEPQDFACSGLFNAVNKSWCEKSSGEALYKLILEECEIYISAAIQSLESQCDTDPSLFLSLLEKCWLDFRRKLQFLCSIAGGEGQTVGPHSVWDLGSELSPKHLFSAQKVRDKLLSIILQLIRDQRSFMSVDMTQLKNTTRPVMSVHMTQLNNLRGLFYGQSLYKSPFFKKPFIDCAVEFYSAEAMQFKEQSDIPLYLKRVEYVA

SEQ ID NO: 49 - DNA, 1218 bp, Arabidopsis thaliana
  CDS (1)..(1218)
atgacgacgacttctgtttgcccgttctcgaaagctgctcgtcctgacgatgggtcgactcgaaaacaaggcgaaattaccgcttctggttgtcctttttctaaagctgctcgtcccgacgatgcctctgctcgaaagcaaggggaaacgacggcttctggttgccctttttctaaatctgctcgtcctgacgaaaatgggagtaaaggatgtcctgaacaagaaggaaacttgaataaggactctactgattctgcaacggtacctgccaagtgcccttttggctatgactctcaaacattcaagcttgggccttttagctgtatgttatgtcaagcacttctatatgagagcagtagatgtgtgccttgcacacatgtgttctgcaaagtatgcttaacacggtttaaggactgccctctatgcggtgctgacattgaaagtattgaagttgatgaaaaccttcagaagatggttgatcaatttattgaaggccatgctagaattaagagatctgtcgtcaatggaacagaaaaagaagaggtcgaaaatgataacaaaaaagtgatttacgctgacgtttccatggaaagaggttctttcttggtgcaacaagctatgagggcatttagtgcccaaaattatgaaagtgctaaatcaaggttggcaatgtgtaccgaggacattcgggatcaactagggagggagggcaatacaccagagttgtgttcacagcttggtgcagtccttggcatgcttggtgactgtagccgagcgatgggagactcaagctctgcagtcaagcattttgaagagagtgttgaattccttatgaaactgccgttgaatgatttggagattacacatacactttctgtctcactcaataaaataggagatctaaaatattatgacgaagatctacaagctgcaaggtcgtattatgatagagctttaaatgtcagacgtgatgcaatgaagcaccacccaaatgctccttcacaaattctggatgtggctgtttccttagccaaagttgcggatatagacaggactctacaaaatgaagttgcagcgacagatgggttcaaggaaggcatgagactgctggaatctttgaaactggactctgaagattctgctctcgagcaacggcggctctctgtactggagttccttaagaagcaagtagaaaccgatgctgaaactgcactctaa

SEQ ID NO: 50 - protein, 405 aa, Arabidopsis thaliana
MTTTSVCPFSKAARPDDGSTRKQGEITASGCPFSKAARPDDASARKQGETTASGCPFSKSARPDENGSKGCPEQEGNLNKDSTDSATVPAKCPFGYDSQTFKLGPFSCMLCQALLYESSRCVPCTHVFCKVCLTRFKDCPLCGADIESIEVDENLQKMVDQFIEGHARIKRSVVNGTEKEEVENDNKKVIYADVSMERGSFLVQQAMRAFSAQNYESAKSRLAMCTEDIRDQLGREGNTPELCSQLGAVLGMLGDCSRAMGDSSSAVKHFEESVEFLMKLPLNDLEITHTLSVSLNKIGDLKYYDEDLQAARSYYDRALNVRRDAMKHHPNAPSQILDVAVSLAKVADIDRTLQNEVAATDGFKEGMRLLESLKLDSEDSALEQRRLSVLEFLKKQVETDAETAL

SEQ ID NO: 51 - DNA, 1152 bp, Arabidopsis thaliana
  CDS (1)..(1152)
atgaatcgtcgtaatcgtggctcttcttcttcttcttctagggtttcgaatacttatgggaaccgccagttctctgataacccgaggactggatccggcggcggagttaatgaatcctttcagagaagatccgatgcaccgcacaaacgaaacaatgaaaaagacgaatcaaaacataaagacgaagatcctgctgacgtttcattgattgtaggaacttgttcttctatgtgcccagagagggaaagagtcacaagagaacgcctgcgtgatcttgcagtgtttgagaggctttatggaaacccctcaaaatcatccacagagatagctgtcaaaaagttttgcagaaccctttcagcggcggatgttcaggcatcggatgtaagaccgctcccagttttagaagaaaccctgagataccttctaagtttgctcgactccaaggagcacccgtttgaagtggttcatgattttattttcgataggacaaggtctattagacaagatcttagcatccagaatttggccaatgagagagtgatctacctttatgaggaaatggtaaaatttcatgtcatatctcacgagaggcttcaaagttgtagtggtacaagtattagctcaatgcatcacttgaacatggagcagctagcaaaaactcttacctctttgtataatatatatgatgcaaatagaaaaccggactatatctacgaaaatgaagccgagttccgctcactctatgtgctgcttcatctcaatcctagtagtggagtgatgggggaaccgctgtctttatggtttcgcaagttgacttttgctttggtaaaatccaaggaaatatgttttgtacgaaaccttttaagattatatcggatgggcaattacaagaacttcttaagtagaacagcttctgaggcgacatacttgcagtattgcataagtgaacatcatattagagagatgcgattagtggctgtccaatacataaacaatgtttgctacaagcttcaaccctatcctctcttgcggttatctcagaacctgaagatgaagtttgtatatttcaggagttggatgttgaatctttatgccatgagtgtggtcttgagacatgtactgatcctgatgggttcactgttttacccgtga

SEQ ID NO: 52 - protein, 383 aa, Arabidopsis thaliana
MNRRNRGSSSSSSRVSNTYGNRQFSDNPRTGSGGGVNESFQRRSDAPHKRNNEKDESKHKDEDPADVSLIVGTCSSMCPERERVTRERLRDLAVFERLYGNPSKSSTEIAVKKFCRTLSAADVQASDVRPLPVLEETLRYLLSLLDSKEHPFEVVHDFIFDRTRSIRQDLSIQNLANERVIYLYEEMVKFHVISHERLQSCSGTSISSMHHLNMEQLAKTLTSLYNIYDANRKPDYIYENEAEFRSLYVLLHLNPSSGVMGEPLSLWFRKLTFALVKSKEICFVRNLLRLYRMGNYKNFLSRTASEATYLQYCISEHHIREMRLVAVQYINNVCYKLQPYPLLRLSQNLKMKFVYFRSWMLNLYAMSVVLRHVLILMGSLFYP

SEQ ID NO: 53 - DNA, 1464 bp, Arabidopsis thaliana
  CDS (1)..(1464)
atgcaaccttggagaagaaaatttccattgttcgaaacaggagttacaatgaaacagaggaagaacagtaatctctcaatcttcgtcgtagtcttctctgttttcctcttcgggatcttcatgtacaatgaagacgtcaagtccatcgcagagtttcctttctccacctcaaaacctcacgacgtccacgacgaagcgacaccgatcacagagatcacaacactaccggttcaagagtcgatcaagaactcagacccaattcaggaatcgatcaaaaacgcagactcagttcaagattcagttaaagacgtagcagaaccagttcaagaggaggtatcgaaaacagaggaagttaaaaagattgagcttttcgctgcgacggaggatgaagaagacgtggaattgccgccggaggaatgcgatttgttcaccggagaatgggtttttgataacgagacgcatccattgtataaagaggatcaatgtgagttcttgacggcgcaagtcacttgcatgagaaatggaagaagagattctctgtatcagaactggagatggcaacctagagattgttctttaccaaagttcaaagcgaaattgctgttggagaagctaaggaacaagagaatgatgttcgttggagattccctaaaccggaaccaatgggaatcaatggtttgtttggttcaatcagtggttcctcccggtcgaaaaagcttgaacaaaaccggttctctctccgtcttccgagtcgaggattataatgcgacggtggagttttattgggcaccatttttggtggaatcgaattcagatgatccaaatatgcatagtatacttaaccgtataataatgcctgagtccattgaaaagcatggagtcaactggaaaggcgttgactttcttgttttcaacacttacatttggtggatgaacacattcgctatgaaagtcctacgaggatcgttcgataaaggagacaccgagtatgaggagatcgaacggccagtagcgtataggagagtgatgaggacttggggagattgggtggaacgaaatattgatcctctacgtaccactgtcttctttgctagcatgtctcctcttcacatcaagagcttggattgggagaatccagatgggatcaagtgtgcattagagacgacaccaatcctaaacatgtcaatgccattcagcgtaggaacagactacagactgttttcagtagcggaaaacgtcacgcattctcttaatgttccggtttactttctcaacattaccaaactctccgaataccggaaagatgctcacacttcggttcacacaatccgacaaggcaaaatgctgacgccggagcaacaagccgatcccaacacttacgccgattgtatccattggtgtcttcccggtttacctgacacgtggaatgagttcctttacacacgtatcatttcccgttcgtga

SEQ ID NO: 54 - protein, 487 aa, Arabidopsis thaliana
MQPWRRKFPLFETGVTMKQRKNSNLSIFVVVFSVFLFGIFMYNEDVKSIAEFPFSTSKPHDVHDEATPITEITTLPVQESIKNSDPIQESIKNADSVQDSVKDVAEPVQEEVSKTEEVKKIELFAATEDEEDVELPPEECDLFTGEWVFDNETHPLYKEDQCEFLTAQVTCMRNGRRDSLYQNWRWQPRDCSLPKFKAKLLLEKLRNKRMMFVGDSLNRNQWESMVCLVQSVVPPGRKSLNKTGSLSVFRVEDYNATVEFYWAPFLVESNSDDPNMHSILNRIIMPESIEKHGVNWKGVDFLVFNTYIWWMNTFAMKVLRGSFDKGDTEYEEIERPVAYRRVMRTWGDWVERNIDPLRTTVFFASMSPLHIKSLDWENPDGIKCALETTPILNMSMPFSVGTDYRLFSVAENVTHSLNVPVYFLNITKLSEYRKDAHTSVHTIRQGKMLTPEQQADPNTYADCIHWCLPGLPDTWNEFLYTRIISRS

SEQ ID NO: 55 - DNA, 759 bp, Arabidopsis thaliana
  CDS (1)..(759)
atggcttcctcatctctcaaatgtttttcttttatcgttgttcttacaactttctttgcaatctcattgaagccatgttattgccacaataaaacccactggaacaccgccggcatcacgtggtatggcgaccgagaaggtcctggcaccacaggaggagcttgtggatatggtgatgcagtggcaaaacacccgtacagatgtatggtttcagccggaggaccttcattgttcaaagacggaaagggttgtggggcttgttacaggcttaaatgcgaccatccgttgtgcacgaaaaagccgatcaaggtgatgatatcggatgagtgtcccggctgcacgaaggagtctgtccattttgatcttagcggtaaggcctttggtgcattggccaaacgtggcaagggagatcaactacgcaaccttggagaactaaaaactatgatcgctatccatgtcgacgccggagcaaatccttactacatgtcattcgcggttaagtttgcaaacggtgatgggaacttcgcctgcattgaggtccaaccggccggaggacagtatatgaaaatggaggaaatgagatccgctgtttggagactaagccctggtgttcctttgaaaggtccgttcaacatcaggcttacctccgccgtgtccggtaagaagatcattgcgaaaggcgttatcccggaaaagtggagtcctggtgctatttaccattctaaggttaacttccccgttcaaaggaagcagaaatga

SEQ ID NO: 56 - protein, 252 aa, Arabidopsis thaliana
MASSSLKCFSFIVVLTTFFAISLKPCYCHNKTHWNTAGITWYGDREGPGTTGGACGYGDAVAKHPYRCMVSAGGPSLFKDGKGCGACYRLKCDHPLCTKKPIKVMISDECPGCTKESVHFDLSGKAFGALAKRGKGDQLRNLGELKTMIAIHVDAGANPYYMSFAVKFANGDGNFACIEVQPAGGQYMKMEEMRSAVWRLSPGVPLKGPFNIRLTSAVSGKKIIAKGVIPEKWSPGAIYHSKVNFPVQRKQK

SEQ ID NO: 57 - DNA, 867 bp, Arabidopsis thaliana
  CDS (1)..(867)
atggagagttacaagtgcagggtttgctttaagagcttcgttaacggaaaagctttaggtggtcacatgagatctcacatgagtaattcacatgaggaagaacaaaggccgagtcaactcagttatgagactgagtccgatgtttcttcgtctgatccgaagtttgcttttacgagctctgttcttcttgaagacggtgaaagcgagagcgagtcgtcgaggaatgttattaacctgactcggaaacgatccaagcgaactcggaaactcgattcgtttgtaaccaagaaggtgaaaacgagtcaactcggatacaagcctgagtctgatcaagagcctcctcatagctcagcttctgatacaacgacggaggaagatcttgccttttgtctcatgatgctctctcgagataaatggaagaagaacaaaagtaataaagaagtagtggaagagatcgagacagaagaagaatcagaaggttacaacaagattaatcgagcaacaacgaaaggaagatacaagtgtgagacctgcgggaaagtgttcaaatcttatcaagcattaggtgggcatagagcaagtcataagaagaacagagtaagtaacaacaaaacagagcaacgaagcgaaacagagtatgataatgttgttgttgttgctaagagaatccatgaatgtccgatttgtctaagagttttcgcatcgggacaagcacttggaggtcacaaaagatctcacggggtagggaatttatctgtgaatcaacaacgtcgagttcatagaaacgagtctgtgaaacagaggatgatagatcttaatcttcctgcaccaaccgaagaagacgaagtctctgtggtgtttcaatga

SEQ ID NO: 58 - protein, 288 aa, Arabidopsis thaliana
MESYKCRVCFKSFVNGKALGGHMRSHMSNSHEEEQRPSQLSYETESDVSSSDPKFAFTSSVLLEDGESESESSRNVINLTRKRSKRTRKLDSFVTKKVKTSQLGYKPESDQEPPHSSASDTTTEEDLAFCLMMLSRDKWKKNKSNKEVVEEIETEEESEGYNKINRATTKGRYKCETCGKVFKSYQALGGHRASHKKNRVSNNKTEQRSETEYDNVVVVAKRIHECPICLRVFASGQALGGHKRSHGVGNLSVNQQRRVHRNESVKQRMIDLNLPAPTEEDEVSVVFQ

SEQ ID NO: 59 - DNA, 1500 bp, Arabidopsis thaliana
  CDS (1)..(1500)
atgcgggaagtggaaacaacggcaatcacagcagctcctccacaattctctcaaatgtttcagaaattagccatggccgtcaagaccaagacctacgagttcttcaccgaagacgataatgagagaaccgatgctgagggtttctctcttctcgattcctccgaggattttatcaccgatcagaaagtcgtcgttcttaaacccgataagcctcttcttagtgcttcttctccgggatctcctattgaatctccggtgaacgatgttcagacgaagaatttgggtgtggtaagtgttgttaaacctaatcaaaagaagctttctcaggttaggaaattggatacacagatgggattgagtttgatttcttctgttttcgctactgcttcgtcttttgaagcttcgtatcttcaattgcaagctgctcacgcgccgtttgttgaggaaaatgtcaaggctgctgatagagctctcgtatctaacctccagaaattgtctgatttgaagcagttttataggaattatcgccaaagtttggattttgagtctgatttagctattgggtcttgcttagaatctcgtgttcaggagaatcagagcaagcttagagctttggaaaccgtctcaaatcgtttacaagctgagatggatgcaaaggatttgcaggtttggagtctgaggaacaaattaggtgagattcagaaatctacttccaagttgtctaagagattgtcttcaaattcatcgttggatgttctgttatcggttagggtttttgagtctctgttgtatgatgcctttaaagctactcagaaattcactaagattctgattgagttgatggaaaaagctgggtgggatttggatttagtggctaagtctgttcatcctgaggtagattatgctaaggagagacataaccggtatgcattgttgtcgtatgtttgcttggggatgtttcgtggttttgatggagaaggatttgatctaaatgagaatgattatgaagagtctgagagaagttctgtagattcttccttgagggaattgatgcaacatgtatcgagtaatccgatggagcttcttgatagagataaagattgtgcattctctagattttgcgataagaagtatcacgagctgattcatccgaacatggcatcttcgatattcagtaacatggatgaaaacgaagctgtgttgagttcttggagatctttgagcacattctatgaatcgtttgtcacgatggctagctcgatttggacccttcacaagttagccttgtcctttgatcctgcagttgagattttccaagttgaaagcggagtggaattttcgattgttttcatggagaatgtcttaaaaagaaaacaagataagaagttttcgatgagtcctactcgagccaaagtaggattcacagtggttcccgggtttaaaatcgggtgcaccgtgattcagtgtcaagtttaccttaccggcggctccaaaatgtaa

SEQ ID NO: 60 - protein, 499 aa, Arabidopsis thaliana
MREVETTAITAAPPQFSQMFQKLAMAVKTKTYEFFTEDDNERTDAEGFSLLDSSEDFITDQKVVVLKPDKPLLSASSPGSPIESPVNDVQTKNLGVVSVVKPNQKKLSQVRKLDTQMGLSLISSVFATASSFEASYLQLQAAHAPFVEENVKAADRALVSNLQKLSDLKQFYRNYRQSLDFESDLAIGSCLESRVQENQSKLRALETVSNRLQAEMDAKDLQVWSLRNKLGEIQKSTSKLSKRLSSNSSLDVLLSVRVFESLLYDAFKATQKFTKILIELMEKAGWDLDLVAKSVHPEVDYAKERHNRYALLSYVCLGMFRGFDGEGFDLNENDYEESERSSVDSSLRELMQHVSSNPMELLDRDKDCAFSRFCDKKYHELIHPNMASSIFSNMDENEAVLSSWRSLSTFYESFVTMASSIWTLHKLALSFDPAVEIFQVESGVEFSIVFMENVLKRKQDKKFSMSPTRAKVGFTVVPGFKIGCTVIQCQVYLTGGSKM

SEQ ID NO: 61 - DNA, 513 bp, Arabidopsis thaliana
  CDS (1)..(513)
atgaggaagttaagaggaatcaaaattagaagaccgattaaacaaatctcaagatggatcctccggagaattaagattcgtcgttcaagatacacccggttaagcccaaaccgcccggtttgcaagccgagagccatcacaaaactcataagttggggtcgaagtctcacatcccacagcgccaggtttattgggtctaaatgctccaattcagggtacataccaattggtcaagaacccattcgagaaaagcccgacccggttccgaaaggtcactcggcggtttacatcggtaaaaaagacggcgactttcagagagttttggtgcctatcgtttactttaaccatcctctgtttggtgagcttcttagagaggctgaagaagaatttgggttttctcaagaaggtggaatcactatcccttgtccttactcagatttcaaacgggtccaaacccgaattgaatccgggtcgggtttctgtaaatttccctggagccggcggtggcaataa

SEQ ID NO: 62 - protein, 170 aa, Arabidopsis thaliana
MRKLRGIKIRRPIKQISRWILRRIKIRRSRYTRLSPNRPVCKPRAITKLISWGRSLTSHSARFIGSKCSNSGYIPIGQEPIREKPDPVPKGHSAVYIGKKDGDFQRVLVPIVYFNHPLFGELLREAEEEFGFSQEGGITIPCPYSDFKRVQTRIESGSGFCKFPWSRRWQ

SEQ ID NO: 63 - DNA, 1296 bp, Arabidopsis thaliana
  CDS (1)..(1296)
atgtttaataatcgacaatctcgccggagattccggttaggaaacttagctagacttgtccaactgcggcaaagcgtcagcagccaacccccacgaaggactgttcaagaaactttgtctcaatcaccaccacagtcaccgctatttcatccacaatcaccaccggaaccaaagtctttacccttgtcgccgttatcaccaaaatcaaaggaagagcctgaatcacagacaatgacaccactgatgtcaaaacatgtcaaaacacatcgaaaccttcttatccaatcaccacctaagtcgccgccagaatccactgaatctcagcagcaatttctagcatcagtgcctcttcgaccgctaacaacagaaccaaaaacaccattgtccccctcgtcaaccctaaaggctaccgaagaatctcagtcccaaccgtctccaccgcttgaatctatcgttgaaacttggttccgaccatcgcctccaacatcaacagaaactggtgatgaaactcaactacctataccaccaccacaagaagccaaaactccaccgtcttcgccgtcaatgatgttaaacgctactgaagaattcgagtcccaaccgaaaccaccgcttttgccgtctaaatccatagacgaaactcggctccgatcaccgcttatgtcgcaagcatcgtctccacctcctttgccgtctaaatccattgatgaaaatgaaacaaggtcccaatcaccgccgatttcgccaccaaaatctgataaacaagcaagatctcagacacactcatcaccatcaccaccgccactgttgtcgccgaaagctagtgaaaaccaccaatctaaatcacctatgccaccaccatctccgacggcacagatatcactatcgtctctgaaatcaccaattccttctccagctacgatcaccgcaccaccgccgccgttttcttcaccactctcccaaactacaccgtcacctaaaccatcgttaccccaaattgaacctaaccaaatcaaatctccttctccaaaactcacaaacaccgaatctcacgcttcaccagagcagaatctagtgaaacctgacgccaacctcatgaacaagattccggctaaaaacgaagttccgaaaaacaggggaacattagagaaaaaaacagagccaatgattatgatgttcataaacagtaacgtccaaggattcaacacttctctttcgcttgattcatcttccatcgatcataaaccaggcgtccacttgacgatcgattatgatcaaagttgtgatttttcttaa

SEQ ID NO: 64 - protein, 431 aa, Arabidopsis thaliana
MFNNRQSRRRFRLGNLARLVQLRQSVSSQPPRRTVQETLSQSPPQSPLFHPQSPPEPKSLPLSPLSPKSKEEPESQTMTPLMSKHVKTHRNLLIQSPPKSPPESTESQQQFLASVPLRPLTTEPKTPLSPSSTLKATEESQSQPSPPLESIVETWFRPSPPTSTETGDETQLPIPPPQEAKTPPSSPSMMLNATEEFESQPKPPLLPSKSIDETRLRSPLMSQASSPPPLPSKSIDENETRSQSPPISPPKSDKQARSQTHSSPSPPPLLSPKASENHQSKSPMPPPSPTAQISLSSLKSPIPSPATITAPPPPFSSPLSQTTPSPKPSLPQIEPNQIKSPSPKLTNTESHASPEQNLVKPDANLMNKIPAKNEVPKNRGTLEKKTEPMIMMFINSNVQGFNTSLSLDSSSIDHKPGVHLTIDYDQSCDFS

SEQ ID NO: 65 - DNA, 3165 bp, Arabidopsis thaliana
  CDS (1)..(3165)
atggaggaggagaagtcgttctcggcgtggtcttggtctgttgagcaatgtttgaaagagtacaagacaagattagacaagggtttaactagcgaagatgtccaaatccgccgtcaaaagtacggttttaacgagcttgctaaggagaaaggcaagcctttatggcatcttgtattggaacaattcgacgatacgcttgtgaagattcttctcggtgctgcgtttatctctttcgttttagcctttttaggtgaggaacacggctcaggttcagggttcgaggcctttgttgagccttttgtgattgttttgattctgattttaaacgctgtggttggtgtgtggcaagagagtaatgctgagaaagcacttgaggctcttaaagagatgcaatgtgaatctgcaaaggttttgagagatgggaatgtgttgcctaatttgcctgctagagagcttgttccaggggatattgtggagttaaatgtaggagataaagtccctgctgatatgagagtttccggtttgaaaacatccactttaagagtcgagcaaagctcgttaaccggtgaagcaatgccggttttgaaaggagcgaatcttgtagtcatggatgattgtgaactgcaagggaaagaaaatatggttttcgctggaacaacggttgttaacggaagctgcgtttgcattgtgacaagtataggtatggatacggagatcgggaaaatccagagacagattcacgaggcgtcgcttgaagagagcgagactccgttaaagaagaagctagacgagtttgggagtagattgactacagctatttgcattgtctgtgttcttgtgtggatgataaactacaagaactttgtttcttgggatgttgtggatggctataaacctgtgaatatcaagttttcattcgagaaatgtacttactacttcaaaatcgctgttgctctcgcagtggcagcgatacccgagggtttacccgctgtgatcacgacatgtttagctttagggacgaggaaaatggcgcagaagaacgcgatagtgaggaagctcccgagtgtagagacactcggttgcacaactgtgatctgttcagataaaaccgggactttaacaacaaaccagatgtctgcaaccgaattcttcacattaggcggtaaaacaacgactactcgagtgttttcagtcagtggtacgacttatgatcctaaagatggtggaattgtggattggggctgcaacaatatggatgctaacttgcaagctgttgctgagatatgttcaatttgtaatgatgctggagtgttctatgaagggaagttgtttagagcaacaggtttgcctacagaagcagcattgaaagttcttgttgagaagatgggtatcccggagaagaagaacagtgagaacatcgaggaagttacaaacttttcagacaatggtagctcagtgaagctagcttgttgcgattggtggaacaaaagatcgaaaaaggtagcgacattagagtttgatcgcgttcgtaagtccatgagtgttattgtgagcgaaccaaatggacaaaaccggcttctcgttaagggtgctgctgagagtatacttgagagaagttcttttgcacagcttgctgatggatctcttgtagctttagatgaatctagcagagaagtaatccttaagaaacattctgaaatgacttcaaaaggattaagatgtttaggattagcttacaaagacgaattaggagagttttcggattactcttccgaagaacatccttcacacaagaagcttttggacccttctagctattcgaacatcgaaacaaatctaatctttgttggagttgttggtctaagagatcctccgcgtgaagaagttggaagagcaattgaagattgcagagacgcagggataagagtaatggttataactggagataacaaatcaacagctgaagctatttgttgtgaaattagattgttttcggagaatgaagatctttcgcagagtagcttcactggtaaagagtttatgtctcttccggcttcacggagatccgagattctgtcaaaatctggagggaaagtgttctctcgagctgagccaaggcataagcaagaaatcgttaggatgcttaaggaaatgggagaaatagttgccatgacaggtgatggtgtgaatgatgctcctgctttgaaacttgctgacattggtatcgccatgggaatcactggaactgaggttgccaaagaagcttcggatatggttcttgcagatgataatttcagtactatagtatcagctgtagcagaaggtcggtccatttacaacaatatgaaagcttttatcaggtatatgatatcatcaaacgttggagaagtaatctccatcttcttaaccgcggcattggggataccggaatgtatgataccggttcagcttctttgggttaatcttgtaactgatggtcctcctgctactgcgttaggcttcaatccagctgatattgatatcatgaagaagccaccccgcaaaagcgatgattgtctcattgattcatgggttcttattcgatatctagtgattggttcttatgttggagttgcaactgttggaatctttgtcttgtggtacacacaagcttcattccttgggattagcctaatctcagatggacacacattggttagcttcactcagcttcagaactggtcagagtgttcttcgtggggaacgaacttcacggcgactccttacacagtcgcaggtggtcttaggaccatcgcgtttgagaacaatccttgcgattacttcactctcgggaaagtcaagccaatgacattatcactcaccgttcttgtggctatcgaaatgtttaactcgctgaacgcgttgtctgaagacaacagtctcttaacgatgccaccatggagaaacccttggctactagtggccatgactgtctcctttgcgctacactgtgtcatcctctatgttcctttcttagctaatgtgtttgggattgtgcctttgagtttcagggaatggtttgtggttattcttgtttccttccctgtgattctgatcgatgaagctctcaagttcattgggagatgcagaaggacaagaatcaagaagaagatcaagacaatgtaa

SEQ ID NO: 66 - protein, 1054 aa, Arabidopsis thaliana
MEEEKSFSAWSWSVEQCLKEYKTRLDKGLTSEDVQIRRQKYGFNELAKEKGKPLWHLVLEQFDDTLVKILLGAAFISFVLAFLGEEHGSGSGFEAFVEPFVIVLILILNAVVGVWQESNAEKALEALKEMQCESAKVLRDGNVLPNLPARELVPGDIVELNVGDKVPADMRVSGLKTSTLRVEQSSLTGEAMPVLKGANLVVMDDCELQGKENMVFAGTTVVNGSCVCIVTSIGMDTEIGKIQRQIHEASLEESETPLKKKLDEFGSRLTTAICIVCVLVWMINYKNFVSWDVVDGYKPVNIKFSFEKCTYYFKIAVALAVAAIPEGLPAVITTCLALGTRKMAQKNAIVRKLPSVETLGCTTVICSDKTGTLTTNQMSATEFFTLGGKTTTTRVFSVSGTTYDPKDGGIVDWGCNNMDANLQAVAEICSICNDAGVFYEGKLFRATGLPTEAALKVLVEKMGIPEKKNSENIEEVTNFSDNGSSVKLACCDWWNKRSKKVATLEFDRVRKSMSVIVSEPNGQNRLLVKGAAESILERSSFAQLADGSLVALDESSREVILKKHSEMTSKGLRCLGLAYKDELGEFSDYSSEEHPSHKKLLDPSSYSNIETNLIFVGVVGLRDPPREEVGRAIEDCRDAGIRVMVITGDNKSTAEAICCEIRLFSENEDLSQSSFTGKEFMSLPASRRSEILSKSGGKVFSRAEPRHKQEIVRMLKEMGEIVAMTGDGVNDAPALKLADIGIAMGITGTEVAKEASDMVLADDNFSTIVSAVAEGRSIYNNMKAFIRYMISSNVGEVISIFLTAALGIPECMIPVQLLWVNLVTDGPPATALGFNPADIDIMKKPPRKSDDCLIDSWVLIRYLVIGSYVGVATVGIFVLWYTQASFLGISLISDGHTLVSFTQLQNWSECSSWGTNFTATPYTVAGGLRTIAFENNPCDYFTLGKVKPMTLSLTVLVAIEMFNSLNALSEDNSLLTMPPWRNPWLLVAMTVSFALHCVILYVPFLANVFGIVPLSFREWFVVILVSFPVILIDEALKFIGRCRRTRIKKKIKTM

SEQ ID NO: 67 - DNA, 1434 bp, Arabidopsis thaliana
  CDS (1)..(1434)
atgggattctggggacttgaagtgaaacctgggaagcctcaagcttataatccaaaaaatgaacaaggaaagattcacgtgacccaggcaactctaggtacgggtttgagcaaagaaaagagtgtgattcagtgttcaataggagacaaggctcctattgctttgtgttcattgttgccaaacaaaatcgaatgttgccctctgaatcttgagtttgacgatgatgatgagccagtggaattcaccgtgactggtgacagaagtatccacttgtctggattcttggagtattatcaggacgatgaagatgattatgagcatgatgaagatgattcagatggtattgatgttggtgagtctgaggaagacgattcgtgtgaatatgatagtgaagaggatgagcaattggatgaatttgaagacttccttgatagcaatcttgaaaggtatcggaatgctgctgccccaaagagtggagttataattgaggagatagaagatgaagagaaacctgccaaagataataaggcaaaacaaaccaagaagaagagtcaagctagcgaaggtgagaatgcaaagaaacaaatcgttgccatagagggtgcccatgttccagttttggaaagcgaagatgaagacgaagacggtttacctattcctaaaggaaaatcatctgaagtagagaatgcgtcaggtgagaagatggttgtagataatgacgaacaaggtagtaacaagaaacggaaggccaaggctgctgagcaagatgatggacaagaaagtgcaaacaagagtaaaaagaagaaaaatcagaaagagaagaagaaaggggaaaatgtcttaaatgaggaagctggacaagttcagacgggaaatgttctgaagaagcaggatattagccaaatttcttcaaacacaaaagctcaagatggaactgcaaacaatgccatgagtgaaagctccaagaccccagataaatctgctgagaagaaaactaaaaataagaaaaagaagaaaccaagtgacgaagctgcagaaatttctggtactgttgagaagcaaaccccagcggactccaagtcttctcaagtacggacatacccaaatgggctcattgttgaagagttgagcatgggaaaacccaacggcaagagagctgatcctggaaaaacggtttctgtgcgctatattggaaaacttcagaagaatgggaagattttcgattccaacattggaaaatcaccatttaagtttcgtctaggtattggatcagtcattaagggatgggatgttggagttaatggcatgcgcgttggtgacaaaaggaagcttacaattcctccatcaatggggtatggtgtgaagggtgctggtggccagattcctcctaattcttggctgacttttgatgtcgaactgattaatgttcaataa

SEQ ID NO: 68 - protein, 477 aa, Arabidopsis thaliana
MGFWGLEVKPGKPQAYNPKNEQGKIHVTQATLGTGLSKEKSVIQCSIGDKAPIALCSLLPNKIECCPLNLEFDDDDEPVEFTVTGDRSIHLSGFLEYYQDDEDDYEHDEDDSDGIDVGESEEDDSCEYDSEEDEQLDEFEDFLDSNLERYRNAAAPKSGVIIEEIEDEEKPAKDNKAKQTKKKSQASEGENAKKQIVAIEGAHVPVLESEDEDEDGLPIPKGKSSEVENASGEKMVVDNDEQGSNKKRKAKAAEQDDGQESANKSKKKKNQKEKKKGENVLNEEAGQVQTGNVLKKQDISQISSNTKAQDGTANNAMSESSKTPDKSAEKKTKNKKKKKPSDEAAEISGTVEKQTPADSKSSQVRTYPNGLIVEELSMGKPNGKRADPGKTVSVRYIGKLQKNGKIFDSNIGKSPFKFRLGIGSVIKGWDVGVNGMRVGDKRKLTIPPSMGYGVKGAGGQIPPNSWLTFDVELINVQ

SEQ ID NO: 69 - DNA, 525 bp, Arabidopsis thaliana
  CDS (1)..(525)
atggagcagccgtacgtgtacgcatacccgcaaggtagtggcccctcgggagctccgactccacaagccggaggagtggtagtggatccaaagtactgcgctccttaccctatagatatggcgatcgtacggaagatgatgtcgttaacggacggcaatttcgtgataacggacgtcaacggaaacctgctgttcaaggtgaaggaaccggtgtttggtctccacgacaagagggtcttgctggatggttctggtactccggtcgtcactttgagagaaaagatggtgagcatgcatgacaggtggcaagtgtttagaggagggagtacggatcagcgtgatctgctgtacacggtgaaaagatcgtcgatgcttcagctaaagaccaaactcgatgtgtttttgggacacaacaaagatgagaagagatgtgatttcagagtcaaagggagttggctcgagcgttcttgtgttgtttacgccggcgaatctgacgccattgttgcccaagtatactatctctaa

SEQ ID NO: 70 - protein, 174 aa, Arabidopsis thaliana
MEQPYVYAYPQGSGPSGAPTPQAGGVVVDPKYCAPYPIDMAIVRKMMSLTDGNFVITDVNGNLLFKVKEPVFGLHDKRVLLDGSGTPVVTLREKMVSMHDRWQVFRGGSTDQRDLLYTVKRSSMLQLKTKLDVFLGHNKDEKRCDFRVKGSWLERSCVVYAGESDAIVAQVYYL

SEQ ID NO: 71 - DNA, 1596 bp, Arabidopsis thaliana
  CDS (1)..(1596)
atggacaagttctcgtacaattcgtatccagattcagctgaatcgtcgccaagatctcgcgatgtcgaatttgaaaatccgtcgccatgggaggaccagcagcagcagaactacaaggtgaagctcatgtgcagctatggcggcaagatccagcctcgtccacacgataaccagcttacttatgtaaacggcgataccaaaatcatgtcggtcgatcgtggtatcagatttccggctttagtatcgaagctctccgccgtctgcagcggtggtggtgatggaggagaaatctcgttcaagtatcagcttccaggtgaagatctagatgcgttgatttcggtgactaatgatgaggatctggagcacatgatgcatgagtacgatcggttgcttcgtttgtctactaaaccagctaggatgcgtttgtttctcttcccgtcttctcccatttccggcggatttggctccgaaggttcgactaaatcggatcgggatacgcttaatccaatccctagccgacctgaatcggagaaatctgtaaccgctcctccgaataatgctgatttcttgtttggatcggagaaagtagctccaattccgccgtcgccagtgaaggttcctcaaccggtaccggaaccagtggtgcttgaaccgccgcagatgttcgtagatcaacggatgttacaaccggaacacggcgtaaatccggcggagattcaaagacaaatccaggaatttcagatgattcaaatcagagaccaagagcaacaaatgcttcatcagaatcagctacatcaacaacaacaacaacaagaggctatacatcaaaatcagcttcatcaccaacaagaggttatacatcagaatcagctgcttcaacaagaggctatacatcagaatcagatgcttcaacaacaacaacaacaagaggctatgtacagaagaaaaaccgaagacgaagccggaagatacttccctcccacatacactcaaaatccggcgccggtgacgaatcaacaacctccggttggctactggcaaggaaacaccaacaacagtaatattcaggggaatatctacacaacaacgtcacagaatctaccggagcaacaacaacaacaacaacaagtatacatgattccagctcaatctcaagctccagggacattataccaaagcgtcatgagaccaacggtacaaggaaaccaaggttattacccatcacctgttcagcgacttcatcatcctgatgcatacatggaacagcagaaccagccaggttacaacgtggttcaaccacagccaacgttttcaggtggtccacaagttatgactagtgttggtccgcaagttatgactagtgtcggtcctccaatggggttacaggaaccttattcacagatggggaagcctgtgtactatacggtggctggagaaggcatgatggttcaaccgccaccagcccagcctcagcagcagcagcagcagtaccagggaatgggtcaaccggttagtggcatgaccgatctcagaaccggaccggatgggaaagtggcggttaacatggctgcaccacaagtttcagattcggtgtga

SEQ ID NO: 72 - protein, 531 aa, Arabidopsis thaliana
MDKFSYNSYPDSAESSPRSRDVEFENPSPWEDQQQQNYKVKLMCSYGGKIQPRPHDNQLTYVNGDTKIMSVDRGIRFPALVSKLSAVCSGGGDGGEISFKYQLPGEDLDALISVTNDEDLEHMMHEYDRLLRLSTKPARMRLFLFPSSPISGGFGSEGSTKSDRDTLNPIPSRPESEKSVTAPPNNADFLFGSEKVAPIPPSPVKVPQPVPEPVVLEPPQMFVDQRMLQPEHGVNPAEIQRQIQEFQMIQIRDQEQQMLHQNQLHQQQQQQEAIHQNQLHHQQEVIHQNQLLQQEAIHQNQMLQQQQQQEAMYRRKTEDEAGRYFPPTYTQNPAPVTNQQPPVGYWQGNTNNSNIQGNIYTTTSQNLPEQQQQQQQVYMIPAQSQAPGTLYQSVMRPTVQGNQGYYPSPVQRLHHPDAYMEQQNQPGYNVVQPQPTFSGGPQVMTSVGPQVMTSVGPPMGLQEPYSQMGKPVYYTVAGEGMMVQPPPAQPQQQQQQYQGMGQPVSGMTDLRTGPDGKVAVNMAAPQVSDSV

SEQ ID NO: 73 - DNA, 1161 bp, Arabidopsis thaliana
  CDS (1)..(1161)
atggatgtgactggcactgtgactgtgagagatgcatttgatcgagtttctaaaaaacagaagctgtatcactcagttactcaagatgtcattgatctagtttgtgatggaatccaagatacattgactcgaatccaattaggtaacgacgatggagtagaaccggaatcggttcttaccgagttgagacgcaagcttgatgctcttttaccgattatccagcttcagaaatcacataaggaaactaaatggagtcttagtaagttggtgaaattgcttgaggtttcttaccatcctgatatatctctagcctgctttagcgttgatttcgatatcaacttagtgaataagatacttatccaccattgttaccgagaagggttgttcgacgttggtgattgtctggttaaggaggctggaagagaggaagaaactgaggttagatctcagttcttagagttccaccagatagtggactcattgaagctcagaaacattgagcctgcaatgagatggatctttgcgaaccgcggaaagctgaagcaaaagagttcaaagctggagtttaagctcttaagtttgaagtactgtgatatattaagagaaggaaagagtgatgatgctttggagtatgcaagaacccattttacgcaatatccactccattttaaggagatacaaaagcttatcacttgtttattatggattggaaactttgagaaaagtccttatgcagagatagtttctccatcatgttgggacaaggtaaccaaagagctaatcatggaatatcaccatcttctcgatcagccaattaactccccgttgaaagtcgctttatccgcgggttatgagagcttaccgtcactgttaaagctggttcatctaatggcattgacgaaacaagaatggcaagcaatgaaacagcttccggttcctctggagttagggaatgagtataagttccactcggcttttgtttgtcccgtgagtagagatcaaagcagcgaagaaaacccgccgatgcagttgccttgtggtcatgttattagcaagcagtcaatgatgagactcagcaagaactgcgctttccgcacattcaaatgcccttattgtcctgcagagactttagcttcagcatgcaggcaattatacttttga

SEQ ID NO: 74 - protein, 386 aa, Arabidopsis thaliana
MDVTGTVTVRDAFDRVSKKQKLYHSVTQDVIDLVCDGIQDTLTRIQLGNDDGVEPESVLTELRRKLDALLPIIQLQKSHKETKWSLSKLVKLLEVSYHPDISLACFSVDFDINLVNKILIHHCYREGLFDVGDCLVKEAGREEETEVRSQFLEFHQIVDSLKLRNIEPAMRWIFANRGKLKQKSSKLEFKLLSLKYCDILREGKSDDALEYARTHFTQYPLHFKEIQKLITCLLWIGNFEKSPYAEIVSPSCWDKVTKELIMEYHHLLDQPINSPLKVALSAGYESLPSLLKLVHLMALTKQEWQAMKQLPVPLELGNEYKFHSAFVCPVSRDQSSEENPPMQLPCGHVISKQSMMRLSKNCAFRTFKCPYCPAETLASACRQLYF

SEQ ID NO: 75 - DNA, 396 bp, Arabidopsis thaliana
  CDS (1)..(396)
atggccactgatagagagaatctgctctccgatgattatgaagaaacggctgcgttttgtggatgtgggtactttcgtagtttcagtttcacccggtggcggagaggagacgacgagtctcgcagtcgcggtggctggagtggttgtttgcaggaagaaagaagagggaattggggaagtgagaaacttaaggggctaaaagagatttctgagaaaatcgcgggaccaaagtggaaaaactttataagaagttttagtagtggcaggaagaagatgaggagagatgttgatttcacttatgatctgaaaaactatagtcttaatttcgatgacggcggcgacggcaaagattcttcaccggagaggtttgtagctccggttgtcatcaaagtttaa

SEQ ID NO: 76 - protein, 131 aa, Arabidopsis thaliana
MATDRENLLSDDYEETAAFCGCGYFRSFSFTRWRRGDDESRSRGGWSGCLQEERRGNWGSEKLKGLKEISEKIAGPKWKNFIRSFSSGRKKMRRDVDFTYDLKNYSLNFDDGGDGKDSSPERFVAPVVIKV

SEQ ID NO: 77 - DNA, 1413 bp, Arabidopsis thaliana
  CDS (1)..(1413)
atgttcaaagttgcaagagcgtcacagtatttggcgatcaccggtgctggtatcgaagacatcaagctttccaagaagtcatgggtgtttccatggcaatcttgcaccgtcttcgacgtttctccggtgaactatactttcaaagtccaagccatgagcgcagagaagcttccttttgttcttcccgctgtttttacgattggtcctcgcgttgatgacgatgacgcgctgattttgtatgctaggttgatttctcctcatgataaagattcaaatcatgtccatgagcttgttgaaggtgttattgaaggagagactcgtgttcttgctgcttccatgactatggaagagatctttaaagggacaaaggagtttaagaaggaggtgtttgataaggttcaactagaattaaaccagtttggtcttgtgatatacaatgccaatgtgaagcagctcgttgatgtgcctggacatgaatacttctcttacttgggtcagaagactcaaatggaagcagcaaatcaggctaggatcgatgtctctgaggccaagatgaagggagagatcggtgccaaggaacggactggtcttactctccagaacgcagccaaaattgacgctgagtcaaagatcatatcgatgcagaggcaaggagaaggaacaaaagaagaaatcaaagtgaggactgaggttaaagtgtttgagaatcagaaggaggctgatgtagctaaggccaatgccgagcttgcgatgaaaaaagctgcttggactaaggatgctcaggtggctgaggttgaagcaaccaaggccgtggctttgagagaagctgagcttcagactcaggtcgagaaaatgaacgctttgactcgaacagagaagctcaaggctgagttccttagcaaagctagtgttgagtatgaaaccaaggttcaagaagcaaattgggaactatacaacaagcagaaacaagcagaggcggttctatacgagaaacaaaagcaagccgaggcacagaaagcgcaagcggatgcggctttctactcaaagcagaaagaagcagagggacttgttgccttagctagtgcgcaagggacttatctaagaaccctcttagacgctgttcagaatgactattcttgtcttagagacttcttgatgattaacaatggtatttatcaagagatcgctaagactaatgcgatggcggttagagacttgcagcccaagattagtgtttggaaccatggtggagaacagggtggtggtagtgggaatgctatgaaggatatagctggactttacaagatgttgcctccggttcttgatacggtttatgagcagactgggatgcagccacctgcttggatcggtactctacgtggtgcggaaccgaagcaagtgactcgcagctaa

SEQ ID NO: 78 - protein, 470 aa, Arabidopsis thaliana
MFKVARASQYLAITGAGIEDIKLSKKSWVFPWQSCTVFDVSPVNYTFKVQAMSAEKLPFVLPAVFTIGPRVDDDDALILYARLISPHDKDSNHVHELVEGVIEGETRVLAASMTMEEIFKGTKEFKKEVFDKVQLELNQFGLVIYNANVKQLVDVPGHEYFSYLGQKTQMEAANQARIDVSEAKMKGEIGAKERTGLTLQNAAKIDAESKIISMQRQGEGTKEEIKVRTEVKVFENQKEADVAKANAELAMKKAAWTKDAQVAEVEATKAVALREAELQTQVEKMNALTRTEKLKAEFLSKASVEYETKVQEANWELYNKQKQAEAVLYEKQKQAEAQKAQADAAFYSKQKEAEGLVALASAQGTYLRTLLDAVQNDYSCLRDFLMINNGIYQEIAKTNAMAVRDLQPKISVWNHGGEQGGGSGNAMKDIAGLYKMLPPVLDTVYEQTGMQPPAWIGTLRGAEPKQVTRS

SEQ ID NO: 79 - DNA, 1302 bp, Arabidopsis thaliana
  CDS (1)..(1302)
atggcgataattccgttagcacagcttaatgagctaacgatttcttcatcttcttcttcgtttcttaccaaatcgatatcttctcattcgttgcatagtagctgcatttgcgcaagttctagaatcagtcaattccgtggcggcttctctaaacgaagaagcgattcaacaaggtctaagtcgatgcgattgaggtgttccttctctccgatggaatctgcgagaattaaggtgattggtgtcggtggtggtggtaacaatgccgttaaccggatgatttcaagcggtttacagagtgttgatttctatgcgataaacacggattcgcaagctctgttacagtcttctgctgagaacccacttcaaattggagaacttttaactcgtgggcttggcactggtggaaacccgcttcttggagaacaagctgcagaagaatcaaaagatgcaattgctaatgctcttaaaggatcagaccttgttttcataactgctggtatgggtggtggaacagggtctggtgctgcacctgtggtagctcagatttcgaaggatgctggttatttgactgttggtgttgttacctatccgtttagctttgaaggacgtaaaagatctttgcaggcactggaagctattgaaaagctccaaaagaatgttgatacccttatcgtgattccaaatgatcgtctgctagatattgctgatgaacagacgccacttcaggacgcgtttcttcttgcagatgatgttttacgccaaggagtacaaggaatctcagatattattactatacctggactagtcaatgtagattttgcagatgtgaaggcagtcatgaaagattctggaactgcaatgctcggggtaggtgtttcttccagcaaaaaccgggcagaagaagcagctgaacaagcaactttggctccattgatcggatcatccatacaatcagctactggtgtcgtctacaacatcactggtggaaaagacataactttgcaggaagtgaaccgagtatcacaggtcgtgacaagtttggcagacccatcggccaacatcatatttggagctgttgtggatgatcgctacaccggagagattcatgtaacgataatcgccacaggcttctctcagtcattccagaagacacttctgactgatccaagagcagctaaactccttgacaaaatgggatcatcaggtcaacaagagaacaaaggaatgtctctgcctcaccagaagcagtctccatcaactatctctaccaaatcgtcttctccccgtagacttttcttctag

SEQ ID NO: 80 - protein, 433 aa, Arabidopsis thaliana
MAIIPLAQLNELTISSSSSSFLTKSISSHSLHSSCICASSRISQFRGGFSKRRSDSTRSKSMRLRCSFSPMESARIKVIGVGGGGNNAVNRMISSGLQSVDFYAINTDSQALLQSSAENPLQIGELLTRGLGTGGNPLLGEQAAEESKDAIANALKGSDLVFITAGMGGGTGSGAAPVVAQISKDAGYLTVGVVTYPFSFEGRKRSLQALEAIEKLQKNVDTLIVIPNDRLLDIADEQTPLQDAFLLADDVLRQGVQGISDIITIPGLVNVDFADVKAVMKDSGTAMLGVGVSSSKNRAEEAAEQATLAPLIGSSIQSATGVVYNITGGKDITLQEVNRVSQVVTSLADPSANIIFGAVVDDRYTGEIHVTIIATGFSQSFQKTLLTDPRAAKLLDKMGSSGQQENKGMSLPHQKQSPSTISTKSSSPRRLFF

SEQ ID NO: 81 - DNA, 1083 bp, Arabidopsis thaliana
  CDS (1)..(1083)
atggctgctgctataagtgctgcagtctctttaccttcctccaagtcatcctctctcctcaccaaaatctcctctgtatcccctcaaaggattttcctcaagaagagcacagtgtgttacagaagagttgtgtcagtgaaggctcaggtgacaacagatactaccgaggcaccaccagttaaagtagtcaaggagtctaagaaacaggaagaagggattgttgtcaacaaattcaaacctaagaacccttacactggtcgctgccttttgaacaccaagatcaccggtgatgacgctcccggtgagacttggcacattgtcttcaccaccgaaggtgaggttccgtatagagaaggacaatcgataggagtgattccagagggaatagacaagaacgggaagccgcacaagctcaggctttactctatcgcgagtagtgccattggtgactttggagactccaagaccgtttctctctgtgtcaagagactagtttacacaaatgatggcggagagattgttaagggggtctgctccaacttcttgtgtgacttgaagccgggtgatgaagctaagatcactggacctgttggcaaggaaatgcttatgccaaaagaccccaatgccaccatcatcatgcttggaacaggaactggaatagctccattcagatcatttttgtggaaaatgttctttgaggagcacgaggactacaagttcaatggtttggcgtggcttttcttgggtgtacccacaagcagctcactgctatacaaggaggagtttgagaagatgaaggagaagaacccagacaacttcaggctggactttgcggtgagcagagagcagacgaacgagaagggagagaaaatgtacattcagacaagaatggcagagtatgcagaagagctgtgggagttgctgaagaaagacaacacctttgtttacatgtgtggtcttaagggtatggagaagggtatcgatgacattatggtctcgcttgctgctaaagatgggatcgattggttggagtacaagaagcaattgaagaggagtgaacagtggaatgttgaagtctactaa

SEQ ID NO: 82 - protein, 360 aa, Arabidopsis thaliana
MAAAISAAVSLPSSKSSSLLTKISSVSPQRIFLKKSTVCYRRVVSVKAQVTTDTTEAPPVKVVKESKKQEEGIVVNKFKPKNPYTGRCLLNTKITGDDAPGETWHIVFTTEGEVPYREGQSIGVIPEGIDKNGKPHKLRLYSIASSAIGDFGDSKTVSLCVKRLVYTNDGGEIVKGVCSNFLCDLKPGDEAKITGPVGKEMLMPKDPNATIIMLGTGTGIAPFRSFLWKMFFEEHEDYKFNGLAWLFLGVPTSSSLLYKEEFEKMKEKNPDNFRLDFAVSREQTNEKGEKMYIQTRMAEYAEELWELLKKDNTFVYMCGLKGMEKGIDDIMVSLAAKDGIDWLEYKKQLKRSEQWNVEVY

SEQ ID NO: 83 - DNA, 21 bp, Artificial
  primer
tgacgccatttcgccttttca

SEQ ID NO: 84 - DNA, 27 bp, Artificial
  primer
cagaaatggataaatagccttgcttcc

SEQ ID NO: 85 - DNA, 21 bp, Artificial
  primer
agctggcgtaatagcgaagag

SEQ ID NO: 86 - DNA, 23 bp, Artificial
  primer
caacttaatcgccttgcagcaca

SEQ ID NO: 87 - DNA, 21 bp, Artificial
  primer
agctggcgtaatagcgaagag

SEQ ID NO: 88 - DNA, 23 bp, Artificial
  primer
ccaatacattacactagcatctg

SEQ ID NO: 89 - DNA, 18 bp, Artificial
  primer
aatgctagagcagcttga

SEQ ID NO: 90 - DNA, 22 bp, Artificial
  primer
caatacattacactagcatctg

SEQ ID NO: 91 - DNA, 18 bp, Artificial
  primer
agaggcccgcaccgatcg

SEQ ID NO: 92 - DNA, 16 bp, Artificial
  primer
  misc_feature (5)..(5): n is a, c, g, or t
  misc_feature (10)..(10): n is a, c, g, or t
  misc_feature (13)..(13): n is a, c, g, or t
wgtgnagwancanaga

SEQ ID NO: 93 - DNA, 16 bp, Artificial
  primer
  misc_feature (5)..(5): n is a, c, g, or t
  misc_feature (10)..(10): n is a, c, g, or t
  misc_feature (13)..(13): n is a, c, g, or t
agwgnagwancanaga

SEQ ID NO: 94 - DNA, 16 bp, Artificial
  primer
  misc_feature (1)..(1): n is a, c, g, or t
  misc_feature (11)..(11): n is a, c, g, or t
ntgcgaswganwagaa

SEQ ID NO: 95 - DNA, 693 bp, Zea mays
  CDS (1)..(693)
atgcttcgactgatcgacgatttcgagagcgtgccagcgctgctgggctggtgtcagtcacctgagcaaggaagagagatggccacgctgcctcgcgagggcgccgcggcggcggactccgaccagcttttggtagaagcacatggctctacacgaacgctgattttgaataggccaaagcagctcaatgcactctcctctgaaatgattaaaggtctcctatggtatttcacagcttttgagaaagatgatggagtcagattgttgattatgaaggggaatagaagagtattttgctctggaggtgatattgctcaatgtgcccggtgtttatataatggaaactggaaatgggtcgatgatttcttccaaaatgaatatttgctaaattacatcattgcgacttacataaaacctcaggtttccattcttagtggaattgtcatgggtggaggagctggtgtttcaatacatggaagatttcgagttgccactgataacacgatttttgcaatgccagaaacagctctaggcctctttccagatgtaggggcctcttattttctatctcggctaccagggttctatggagaatatgttggtctaactggtgccagattggatggtgcggaaatgcttgcctgtggtttttttttctcattttgtcccgtcaaagaggttgccattgcttga

SEQ ID NO: 96 - protein, 230 aa, Zea mays
MLRLIDDFESVPALLGWCQSPEQGREMATLPREGAAAADSDQLLVEAHGSTRTLILNRPKQLNALSSEMIKGLLWYFTAFEKDDGVRLLIMKGNRRVFCSGGDIAQCARCLYNGNWKWVDDFFQNEYLLNYIIATYIKPQVSILSGIVMGGGAGVSIHGRFRVATDNTIFAMPETALGLFPDVGASYFLSRLPGFYGEYVGLTGARLDGAEMLACGFFFSFCPVKEVAIA

SEQ ID NO: 97 - DNA, 603 bp, Zea mays
  CDS (1)..(603)
atgccgtttcgggaagccgtgaagggatcggccacgacgatggtgcgggggaagacgcagatgaagcggatagagaacccgaccagccgccaggtcaccttctccaagcgccgcaacggcctgctcaagaaggcgttcgagctctccgtcctctgcgacgccgaggtcgcgctcgtcgtcttctccccgcgcggcaagctctacgaattcgccagcggaagtgcgcagaaaacgattgaacgttatagaacgtacacaaaggataatgtcagcaacaagacagtacagcaggacattgagcaagtaaaagctgatgctgagggcctgtcaaagaaactcgaagcacttgaagcttacaaaagaaaacttttgggtgagaggttggaagaatgctccattgaagagctgcacagtttggaagtgaagcttgaaaagagccttcattgcatcaggggaagaaagactcagctgctggaggagcaactccataagctgaaggagaaggagatgaatctgcgcaagagcaacgaagatttgcgtgaaaaggtaatggtgccgaaacatcttacagccatgaggaccacaagacgctgcacgctttga

SEQ ID NO: 98 - protein, 200 aa, Zea mays
MPFREAVKGSATTMVRGKTQMKRIENPTSRQVTFSKRRNGLLKKAFELSVLCDAEVALVVFSPRGKLYEFASGSAQKTIERYRTYTKDNVSNKTVQQDIEQVKADAEGLSKKLEALEAYKRKLLGERLEECSIEELHSLEVKLEKSLHCIRGRKTQLLEEQLHKLKEKEMNLRKSNEDLREKVMVPKHLTAMRTTRRCTL

SEQ ID NO: 99 - DNA, 849 bp, Zea mays
  CDS (1)..(849)
  misc_feature (32)..(32): n at position 32 is a or g or c or t/u
atggcacaccaaggagagtacgtggaggagcnagccatggcttcatcggtggccgccgcggcgagcacattcctgggcacccgcctggcggacccggcgccacagaacgggcgcatcgtggcccggttcgggttcgggttgggcggcaaggcgaagcctgctccgaagaaggtggcgaagacatcgacctcctctgaccggccgctgtggttccccggcgccgtggcgcccgactacctggacggctcgctggtcggcgactacgggttcgacccgttcggtctcgggaagcccgtggagtacctgcagttcgagttggactcgctggaccagaacctggccaagaatgaggccggcggcatcatcggcacccggttcgagtcctccgaagtcaagtccaccccgttgcagccctacagcgaggtgttcggcctccagcggttccgcgagtgcgagctcatccacggccgctgggccatgctcgccaccctcggcgccctctccgtcgagtggctcaccggcgtcacctggcaggacgccggcaaggtggagctggtggacgggtcctcctacctgggccagccgctgccgttctccatctcgacgctcatctggatcgaggtgctcgtgatcggctacatcgagttccagcgcaacgccgagctcgacccggagaagaggctgtaccccggcggctcctacttcgacccgctcggcctggcggccgaccctgagaagaaggagcggctgcagctggcggagatcaagcacgcgcggctcgccatggtcgccttcctcggcttcgccgtgcaggccgccgccaccggcaaggggccgctcaacaactga

SEQ ID NO: 100 - protein, 282 aa, Zea mays
  misc_feature (11)..(11): Xaa can be Arg or Gln or Leu or Pro
MAHQGEYVEEXAMASSVAAAASTFLGTRLADPAPQNGRIVARFGFGLGGKAKPAPKKVAKTSTSSDRPLWFPGAVAPDYLDGSLVGDYGFDPFGLGKPVEYLQFELDSLDQNLAKNEAGGIIGTRFESSEVKSTPLQPYSEVFGLQRFRECELIHGRWAMLATLGALSVEWLTGVTWQDAGKVELVDGSSYLGQPLPFSISTLIWIEVLVIGYIEFQRNAELDPEKRLYPGGSYFDPLGLAADPEKKERLQLAEIKHARLAMVAFLGFAVQAAATGKGPLNN

SEQ ID NO: 101 - DNA, 741 bp, Zea mays
  CDS (1)..(741)
atggcggcgcccatgtcagccatcgactcagcgtggcagctcctgatcgccaacttcaccgagttccagctcgccaccgtcgtcaccttcctgctccacgagaccgtcttcttcctctccggcctcccctccctcctcttcgagcgcttcggactcttcgccaagtacaagatccagaagaagagcaacacctctgcttaccaaaacagatgtgtcttgcgcctcattctctaccatgtatgtgtgaacctgcctgtcatgattttctcgtatcctgccttcaaattcatgggtctcaggagctctcttcctttgccacattggtcggttgttgtatctcaagttcttttctactttgtccttgaggattttatattctattgggggcacagggcattgcatacgaaatggctatacaaacacgttcacagcgtccaccacgagtacgccacaccctttggtttaacatcggaatatgcccacccagctgaaattttgttcctgggattcgccacagttgttggtcctgctcttactggccctcatctcttcaccctgtggctgtggatggtgttgagggttttggagacagttgaagctcacagcggctatcacttcccatggagcccatcaaatttcctgccgctgtatggcggctcggacttccatgactaccatcaccgtgtgctgtacacaaagtcagggaactatgcctcaacatttgtttacatggactggtga

SEQ ID NO: 102 - protein, 246 aa, Zea mays
MAAPMSAIDSAWQLLIANFTEFQLATVVTFLLHETVFFLSGLPSLLFERFGLFAKYKIQKKSNTSAYQNRCVLRLILYHVCVNLPVMIFSYPAFKFMGLRSSLPLPHWSVVVSQVLFYFVLEDFIFYWGHRALHTKWLYKHVHSVHHEYATPFGLTSEYAHPAEILFLGFATVVGPALTGPHLFTLWLWMVLRVLETVEAHSGYHFPWSPSNFLPLYGGSDFHDYHHRVLYTKSGNYASTFVYMDW

SEQ ID NO: 103 - DNA, 1401 bp, Zea mays
  CDS (1)..(1401)
atgagcttcggcttctccaagcacttcttcgcaaagtacgacctcggcgaggaggtcggccgcggtcacttcggctacacgtgctccgccaaggccaagaagggcgagcacaggggccaggacgtagccgtcaaggtcatccccaaggccaagatgacaacagctatcgccattgaagatgtgagaagagaagtgagaatattgagttctctgacaggccacagtaatttagtgcagttctacgatgctttcgaggatgaagataacgtgtatatagttatggaattatgtaaaggaggtgaactgctggacaggatattggctagaggtggaaagtactctgaagaggatgcgaaggtcgttatggtacaaattttgagtgttgtatcattttgccatcttcaaggtgttgttcaccgtgatctgaaaccagagaatttccttttctcttcaaaggatgaaaactctcccttgaaggtcatagattttggcttgtctgactttgtgaagccagatgaaagactaaacgacattgttggaagcgcatactatgttgctccagaggtcctccacagatcttatgccaccgaggcagatatgtggagcattggagtaattgcctacatcttgctctgtgggagtaggcctttctgggcgcgcacggagtcgggaatcttccgagctgtcttgaaggcggaaccgagttttgatgaggccccatggcccactctcacggctgaagctaaagattttgtaaaaaggcttcttaacaaggattaccgcaagagaatgacggctgcacaagctctcagtcatccatggatccgtaattctcaacaagtgaaggttcctttggatatgataatctataagctaatgagagcgtacatcagctcgtcttcgctgcggaagtctgctttgagggccctagccaagacgctgacgacggaccaactcttttatgtaagggagcagtttgaactgctgggcccaaacaagaatggctatatctcattgcaaaatctgaaatcggctttagcgaagaactccacggatgcgatgaaggactccagggttgtcgactttgttaacacggtgtgcactcttcagtacaggaagctggacttcgaagagttcgccgcttccgccatcagcgtttaccagatggaagccttggagacctgggagcagcacgcgcggcgtgcgtacgagctgttcgacaaggaaggaaaccggcccattgtgatcgaagaacttgcgtcggaactcgggcttggcccgtcagtgcctctccacgttgtcctccaagactgggtcagacacgccgacgggaagctgagcttcctggggttcatcaagctcttgcacggggtctcgtcgcgctcgatcccaaaggcctga

SEQ ID NO: 104 - protein, 466 aa, Zea mays
MSFGFSKHFFAKYDLGEEVGRGHFGYTCSAKAKKGEHRGQDVAVKVIPKAKMTTAIAIEDVRREVRILSSLTGHSNLVQFYDAFEDEDNVYIVMELCKGGELLDRILARGGKYSEEDAKVVMVQILSVVSFCHLQGVVHRDLKPENFLFSSKDENSPLKVIDFGLSDFVKPDERLNDIVGSAYYVAPEVLHRSYATEADMWSIGVIAYILLCGSRPFWARTESGIFRAVLKAEPSFDEAPWPTLTAEAKDFVKRLLNKDYRKRMTAAQALSHPWIRNSQQVKVPLDMIIYKLMRAYISSSSLRKSALRALAKTLTTDQLFYVREQFELLGPNKNGYISLQNLKSALAKNSTDAMKDSRVVDFVNTVCTLQYRKLDFEEFAASAISVYQMEALETWEQHARRAYELFDKEGNRPIVIEELASELGLGPSVPLHVVLQDWVRHADGKLSFLGFIKLLHGVSSRSIPKA

SEQ ID NO: 105 - DNA, 993 bp, Zea mays
  CDS (1)..(993)
atggcaagtagcttcattcaccgagcgtgcaggcacaggcagcagcttgccatggcgtctcccaccttgatgcaatgcctggtcgccgtttccctcctctcctgtgtcgcccacgcacagctctcgcccacgttctatgcgtcctcctgccccaacctgcagagcatcgttcgggcggcgatgacccaggccgtcgcaagtgagcagaggatgggcgcctctctgctcaggctcttcttccacgactgcttcgttcaaggctgcgacggatcgatccttctcgacgccggaggggagaagaccgccgggccgaacctgaactcggtgcgcggctttgaggtcatcgacaccatcaagcggaacgtcgaggccgcgtgccccggcgtcgtgtcgtgcgccgacatcctcgcgcttgccgcgcgcgacggaaccaaccttatcggcgggccgacctggagcgtgccgctcgggcggcgggactcgacgacggccagcgcctcgctcgccaacagcaacctcccgcccccgacggccagcctcggcacgctcatctccctgttcggcaggcagggcctgtcgccgcgcgacatgacggcgctgtcgggcgcgcacaccatcgggcaggcccggtgcaccaccttccgcgaccgcatctacggcgacaccgacatcaacgcctccttcgcggcgctgcggcagcagacgtgcccgcggtccggcggcgacggcaacctggcgcccatcgacgtgcagacgccggtgaggttcgacacggcctacttcaccaacctgctgtcgcggaggggcctgttccactcggaccaggagctcttcaacggcgggtcgcaggacgcgctggtgaggcagtacagcgccagcgcctcgctcttcaacgccgacttcgtggcagccatgattaggatgggcaacgttggggtgctcaccggcaccgctggacagatcaggcgcaactgccgggtcgtcaacagctga

SEQ ID NO: 106 - protein, 330 aa, Zea mays
MASSFIHRACRHRQQLAMASPTLMQCLVAVSLLSCVAHAQLSPTFYASSCPNLQSIVRAAMTQAVASEQRMGASLLRLFFHDCFVQGCDGSILLDAGGEKTAGPNLNSVRGFEVIDTIKRNVEAACPGVVSCADILALAARDGTNLIGGPTWSVPLGRRDSTTASASLANSNLPPPTASLGTLISLFGRQGLSPRDMTALSGAHTIGQARCTTFRDRIYGDTDINASFAALRQQTCPRSGGDGNLAPIDVQTPVRFDTAYFTNLLSRRGLFHSDQELFNGGSQDALVRQYSASASLFNADFVAAMIRMGNVGVLTGTAGQIRRNCRVVNS

SEQ ID NO: 107 - DNA, 795 bp, Zea mays
  CDS (1)..(795)
  misc_feature (4)..(141): n at positions 4 and 141 is a or g or c or t/u
atgncacgcagcggccacttttgctgctgctggttggttggtttgcgtttgttcgggcagctagcgtttcctggattggggacgcttccgtttcgggaagccgtgaagggatcggccacgacgatggtgcgggggaagacngagctgaagcggatagagaacgcgacgagccggcaggtgaccttctcgaagcgccgcaacgggctgctcaagaaggccttcgagctctccgtgctctgcgatgctgaggtcgggctcgtcgtcttctccccgcgcggcaagctctacgagttcgccagcgccgccagcctccagaaaacaattgaccgctacaggacatacacaagggaaaatgtcaataacaagactgttcaacaagatatacagcaagtcaaagcagatgccgtaagcttggcaagtagactcgaagccctagaaaagaccaaacgaatgtttctgggtgaaaatttagaagaatgctccattgaagaactgcacaatctggaggttaaactggcgaagagccttcacgtcatcagagggaagaagacacaactgctggagcagcagatatccaagctgaaggagaaggagaggaccctgctccaagacaacaaagagttgcgggataagcgcaacctccagtctccaccggaggcgccaccggacctgaaccgctgtgtccctccttggccgcgtagcctgccggcaccgagcaatgacatggacgtggagacggagctgtacataggattacccggcagggagcgctcctccaaccgggactctgattga

SEQ ID NO: 108 - protein, 264 aa, Zea mays
  misc_feature (2)..(2): Xaa can be Thr or Pro or Ala or Ser
MXRSGHFCCCWLVGLRLFGQLAFPGLGTLPFREAVKGSATTMVRGKTELKRIENATSRQVTFSKRRNGLLKKAFELSVLCDAEVGLVVFSPRGKLYEFASAASLQKTIDRYRTYTRENVNNKTVQQDIQQVKADAVSLASRLEALEKTKRMFLGENLEECSIEELHNLEVKLAKSLHVIRGKKTQLLEQQISKLKEKERTLLQDNKELRDKRNLQSPPEAPPDLNRCVPPWPRSLPAPSNDMDVETELYIGLPGRERSSNRDSD

SEQ ID NO: 109 - DNA, 741 bp, Zea mays
  CDS (1)..(741)
  misc_feature (633)..(695): n at positions 633 and 695 is a or g or c or t/u
atggcagggatcgatcggggaagacgagacaagcttcttctgctgctgctgccgcccccgccagccctagttcaccagagttactacttactagccaatctgacaccgatccaccgccggcaccgaccgtccatggcgcggggcaaggtgcagcttcggcgcgtcgagaacccggtgcaccggcaggtgacattctgcaagcgccgcgcggggctgctcaagaaggcccgggagctctccgtcctctgcgacgccagcgtcggcatcatcgtcttctctgcgcacggcaagctctacgacctcgccaccaccgggaccatggaggagctgatcgagaggtacaaagctgccagcgccggagaagcgacgaccgacggctgcggcaggcacaacaggatggaccccaaacatgaaaccacggtgctgcaacaggaaatcaacctgcttcagaagggactgaggtacatctacgggaacagggcgaacgagcacatgaatgttgacgaactgaacgccctagagaggtacttggagatatggatgtacaacacccgctctgcaaagatgcagataatggctcaagagatccaagcactgaaaagcaaggcatgtcaaaaccctgtacatattaanctctacgaagacccgaggctttcagcacccatttacctcactaaaagtgtctgcgtgtacgnaggaaggcatgttgaaagctgccaacgagattctccaggaaaatga

SEQ ID NO: 110 - protein, 246 aa, Zea mays
  misc_feature (211)..(211): Xaa can be Lys or Asn
  misc_feature (232)..(232): Xaa can be Ala or Glu or Gly or Val
MAGIDRGRRDKLLLLLLPPPPALVHQSYYLLANLTPIHRRHRPSMARGKVQLRRVENPVHRQVTFCKRRAGLLKKARELSVLCDASVGIIVFSAHGKLYDLATTGTMEELIERYKAASAGEATTDGCGRHNRMDPKHETTVLQQEINLLQKGLRYIYGNRANEHMNVDELNALERYLEIWMYNTRSAKMQIMAQEIQALKSKACQNPVHIXLYEDPRLSAPIYLTKSVCVYXGRHVESCQRDSPGK

SEQ ID NO: 111 - DNA, 1173 bp, Zea mays
  CDS (1)..(1173)
atgcagagcgcggctgccatcgggctcctacggccatgtgccgcgcggccgctcgccgcctacactagcccacgccgcggcgccggcgcgtgcagcggcggcacccagccgatcatcacgccccgcggcatccgcctctccgcccgccccggtctcgtgccggcctcgccgctggaggagaaggagaaccggagatgcagggccagtatgcacacggcggcgtcggccggagaggaagctgggggagggctcgccaagacgctgcagctgggggcgctcttcgggctctggtacctcttcaacatctacttcaacatctacaacaagcaggttctgaaggttttgccataccctataaacatcacaacggtgcagtttgctgttggaagtgccattgctttgttcatgtggattactggtatccataaaaggccaaagatttcgggtgcccagcttttcgctatccttcctctagctattgtccataccatgggcaatcttttcacaaacatgagccttggaaaggttgcagtgtcatttacacatactataaaggccatggaacctttcttctcagttctcctttcagcaattttccttggggagttgcctacgccatgggttgtgttgtctcttcttccgattgttggtggtgtagctttggcatcccttactgaggcctcctttaactgggctggattttggagtgcaatggcttcaaatgtaaccttccagtcaaggaatgtgctaagcaagaaacttatggtgaagaaagaggaatctctcgacaacattaacctattctcgatcattacagtcatgtcattcttcctgttggccccagtaaccttacttacagaaggtgttaaagttagtccagcagtgttgcagtctgctggtttgaacttgaaacaggtatacacaaggtcattgattgctgcattctgcttccatgcataccaacaggtatcatacatgatcctcgccagggtatccccagtcacacattcagtgggcaattgcgtcaagcgtgtggtggtcattgtgacctctgttctgttcttcaggacccctgtttctcccatcaactctcttggtaccgggatcgctcttgctggagttttcctatactcgcaattgaagagacttaagcccaagcccaagactgcttga

SEQ ID NO: 112 - protein, 390 aa, Zea mays
MQSAAAIGLLRPCAARPLAAYTSPRRGAGACSGGTQPIITPRGIRLSARPGLVPASPLEEKENRRCRASMHTAASAGEEAGGGLAKTLQLGALFGLWYLFNIYFNIYNKQVLKVLPYPINITTVQFAVGSAIALFMWITGIHKRPKISGAQLFAILPLAIVHTMGNLFTNMSLGKVAVSFTHTIKAMEPFFSVLLSAIFLGELPTPWVVLSLLPIVGGVALASLTEASFNWAGFWSAMASNVTFQSRNVLSKKLMVKKEESLDNINLFSIITVMSFFLLAPVTLLTEGVKVSPAVLQSAGLNLKQVYTRSLIAAFCFHAYQQVSYMILARVSPVTHSVGNCVKRVVVIVTSVLFFRTPVSPINSLGTGIALAGVFLYSQLKRLKPKPKTA

SEQ ID NO: 113 - DNA, 444 bp, Zea mays
  CDS (1)..(444)
  misc_feature (4)..(441): n at positions 4, 5, 396, and 441 is a or g or c or t/u
atgnnggtggagctgaagcggatcgagaacaagatcaaccgccaggtcaccttcgccaagcgccgcaacggcctgctcaagaaggcgtacgagctctccgtgctctgcgacgccgaagtcgcgctcatcatcttctccaaccgcggcaagctctacgagttctgcagcggacagagcattaccaaaacacttgagaggtatgaaaaaaacagttatggaggaccagatactgctgtacagaacaaggagaacgagttagtccagagcagtcgtaatgagtacctcaagctgaaagcgagggtggataatttacagaggactcagaggaatttgcttggtgaagatctggggtcacttggtgtcaaagagcttgagcagcttgagaagcaacttganttcatccttaaggcacataagatccacaaggacacaacatatgcntga

SEQ ID NO: 114 - protein, 147 aa, Zea mays
  misc_feature (2)..(2): Xaa can be any amino acid
  misc_feature (132)..(132): Xaa can be Asp or Glu
MXVELKRIENKINRQVTFAKRRNGLLKKAYELSVLCDAEVALIIFSNRGKLYEFCSGQSITKTLERYEKNSYGGPDTAVQNKENELVQSSRNEYLKLKARVDNLQRTQRNLLGEDLGSLGVKELEQLEKQLXFILKAHKIHKDTTYA

SEQ ID NO: 115 - DNA, 876 bp, Zea mays
  CDS (1)..(876)
atgattgacagagacaagaacgcacaccagcacggcgccgacaagcagccggccaggcaaggccaggccgaagctcccctcctcggtgcgtcccttaacgacagcggcacggaacagcaacgaggtcgcgccacagaccgcgaagtaggagacgacaagcgtggctgcggtgccggtgcggccctggagcagctgcctgctcttggccatggcagcgagcccgcagagcggctcgagcacggagacgacgctggcgaggtgccacagcgcggagatgtagacgtggatcccgaggaagacgaggacgacgaggaggaggaagaggacgaaggcgagggagggcggcgcggactcggacgcgttgggggcgaagacgacgatgagcaggaggacggcgagcgcgaaggcgaggtggtaggcgagcatgaggagggagacccagaggaaggtgcggaggaggcggggcaggatggggcgcagcgcgctgagcgaggaggagacggacgcgggcttcccggtgtagagggaggcgacggtgaagacggcggcggcggtggagaggagggagaaggtgaagaggacgatgaggtagatgaactggtacgcgaagaggccgagccacggcgcgaaccccgagtgggcggcgccccggatgcggagcaggatggggtgggtgaagagggagtgcgcgagcacggcgaaggagagcgggaagacgaggcaggcggtgagcagcgcgaaggtgcgcggagccgcgcgcgggatcgacgccgagacgcggatcagctccgccgcgcccagcgccgcgaggtcgctcgacgccaggtccatcgccgccgacgggatgctgcttgtgtcggccggcccggttggtga

SEQ ID NO: 116 - protein, 291 aa, Zea mays
MIDRDKNAHQHGADKQPARQGQAEAPLLGASLNDSGTEQQRGRATDREVGDDKRGCGAGAALEQLPALGHGSEPAERLEHGDDAGEVPQRGDVDVDPEEDEDDEEEEEDEGEGGRRGLGRVGGEDDDEQEDGEREGEVVGEHEEGDPEEGAEEAGQDGAQRAERGGDGRGLPGVEGGDGEDGGGGGEEGEGEEDDEVDELVREEAEPRREPRVGGAPDAEQDGVGEEGVREHGEGEREDEAGGEQREGARSRARDRRRDADQLRRAQRREVARRQVHRRRRDAACVGRPGW

SEQ ID NO: 117 - DNA, 1332 bp, Zea mays
  CDS (1)..(1332)
atggcccggctcgtgctctccgagtgctcgggcctcgcgcccgtccgccgcctgcgcgccggccggggcgccattgcggcgcggtcaccccccgcgctctccgcggcgccgcgccgtcgtcccgcgtccgcgtccatccaccgcgactgggcgctccgcgtctccgcgcccacccgcctcgcctccgccgccgtcgaggaggacaagccgagcgccgcgccggggcaggaggagggcgcggcggccggcggggagttcgacccgggggcgccgccgccgttcgggctggccgagatccgcgccgccatccccaagcactgctgggtcaaggacccctggcgctccatgagctacgtgctgcgcgacgtcgccgtcgtcctgggcctcgccgcagcggccgcgcgcctcgacagctggctcgtctggccgctctactgggccgcgcagggcaccatgttctgggcgctcttcgtcctcggccacgactgtggacacgggagcttctcgaacaaccccaagttaaacagcgtcgtcggccacatactccattcctccattcttgtgccataccacggatggaggattagccacaggacgcaccatcaaaaccacggtcacgttgagaaggacgagtcctggcacccgctaccagagaggctgtacaaaagcctggactttatgactaggaaactgcggttcaccatgccgttccccttgctcgcgttcccgttatacttgtttgcgaggagtccagggaagtcaggatcacacttcaacccaggcagtgatctgttccaacctactgaaaagaatgacatcataacatcgacggcgtcctggctggccatggttggtgttctggccggtctcacctttctgatgggtcctgttccgatgctaaagctctacggagtcccatacttggtatttgttgcttggctggatatggtcacatacttgcaccatcatggccacgaagacaagcttccctggtaccgtggaaaggagtggagttatctgcgtggaggactgacgacgctcgaccgggactacggatggatcaacaacatccatcacgacatcggaactcatgtcatccatcacctcttccctcagatcccgcattaccatctcatcgaggcgaccgaggcagcaaagccggttcttggcaagtactacaaagagccgaagaagtcgggtgctctgccgtggcacctattccgggtgctggcacagagcttgaagcaagaccactatgtcagtgataccggagatgtggtctactaccaagctgagtcgaaaacgagcacctctgcacaaaaatccgattga

SEQ ID NO: 118 - protein, 443 aa, Zea mays
MARLVLSECSGLAPVRRLRAGRGAIAARSPPALSAAPRRRPASASIHRDWALRVSAPTRLASAAVEEDKPSAAPGQEEGAAAGGEFDPGAPPPFGLAEIRAAIPKHCWVKDPWRSMSYVLRDVAVVLGLAAAAARLDSWLVWPLYWAAQGTMFWALFVLGHDCGHGSFSNNPKLNSVVGHILHSSILVPYHGWRISHRTHHQNHGHVEKDESWHPLPERLYKSLDFMTRKLRFTMPFPLLAFPLYLFARSPGKSGSHFNPGSDLFQPTEKNDIITSTASWLAMVGVLAGLTFLMGPVPMLKLYGVPYLVFVAWLDMVTYLHHHGHEDKLPWYRGKEWSYLRGGLTTLDRDYGWINNIHHDIGTHVIHHLFPQIPHYHLIEATEAAKPVLGKYYKEPKKSGALPWHLFRVLAQSLKQDHYVSDTGDVVYYQAESKTSTSAQKSD

SEQ ID NO: 119 - DNA, 1002 bp, Zea mays
  CDS (1)..(1002)
atggcaacttccatgggttgtctcgtcttgctctgccttgtttcttctctccttcccagtgccgtccttggccacccatggggtggcttgttcccacagttctatgaccattcgtgccccaaggcgaaggagattgtgcagtccattgtggcacaggctgtggccaaggagaccaggatggcggcatctttagtcagactgcatttccatgactgctttgtcaagggctgcgatgcttcggtgctgttggacaacagcagcagcatagttagtgagaaagggtccaacccgaacaggaactccctcagggggtttgaggtgatcgaccagattaaggctgctcttgaggctgcctgcccaggcacagtctcctgtgccgacattgttgcccttgcggctcgtgattccaccgccctggttggtggaccatactgggacgtgccacttggccggagagactcgctcggtgcaagcatccagggctccaacaatgacatcccagcccccaacaacacactccccactatcatcaccaagttcaagcgccagggcctcaatgttgttgatgttgtcgccctctcaggtggtcacaccattggtatgtctcggtgcactagtttccggcagaggctatacaaccagacaggcaatggcatggctgacagcacactggatgtatcctacgccgcaaagctgaggcagggatgcccccgctctggtggtgacaacaacctcttccccttggacttcatcacccctgccaagtttgacaatttttactacaagaacctcctggccggcaagggccttctaagctctgatgagattctgttaaccaagagcgctgagacagcggccctcgtgaaggcatatgctgctgatgtcaatctcttcttccagcactttgcacagtctatggtgaatatgggaaacatctcgccactgacagggtcacaaggtgagatcaggaagaactgcaggaggctcaacaatgaccactga

SEQ ID NO: 120 - protein, 333 aa, Zea mays
MATSMGCLVLLCLVSSLLPSAVLGHPWGGLFPQFYDHSCPKAKEIVQSIVAQAVAKETRMAASLVRLHFHDCFVKGCDASVLLDNSSSIVSEKGSNPNRNSLRGFEVIDQIKAALEAACPGTVSCADIVALAARDSTALVGGPYWDVPLGRRDSLGASIQGSNNDIPAPNNTLPTIITKFKRQGLNVVDVVALSGGHTIGMSRCTSFRQRLYNQTGNGMADSTLDVSYAAKLRQGCPRSGGDNNLFPLDFITPAKFDNFYYKNLLAGKGLLSSDEILLTKSAETAALVKAYAADVNLFFQHFAQSMVNMGNISPLTGSQGEIRKNCRRLNNDH

SEQ ID NO: 121 - DNA, 1326 bp, Zea mays
  CDS (1)..(1326)
atgcacgaggggcaggcagttggcctcctttcctcgccgcgctttggagcccacctcggtctcggtgcagtgtctcgctcgcgcgtgccggcgtgcgtgccctggtggcccatggggaggaggataatgaagagtgggcgacgcacgacgatgcagccgcggccggcgcttcttctcctcgtcctcgtcctcggcgtgtcgctgcgtggatgcattgcgcagggcgggggcggaggaggagggctcacgcgggggagcttccccaagggcttcgtcttcggcaccgccgccgccgcttaccagtacgagggagccgtgaagacggatggcagagggcaaacgatctgggacacgtttgcacacacttttggcaagatttcagacttcagcaacgcggatgttgcagttgaccagtaccaccgtttcgaggaggacgtgcagctcatggcggacatgggaatggatgcgtatcgcttctctattgcctggtcaagaattctgccaaatggtacgggccaagtcaatcaggccggcatcgaccactacaacaaagtgatcaatgcactactatcaaaaggaattcagccatatgtaaccctgtaccactgggacctcccccaggccctggaagacaggtacaacggatggctggacaggcagatagttaatgactttgcggcttatgctgatacatgcttcaaggcgttcggagaccgtgtgaagcactggatcaccctcaatgagccgcacacggtcgccgtccaaggctacgatgctgggcttcatgcgccagggcgttgctcggtgctgctccatctatactgcaggacagggaactctggcactgagccctacatcgttgctcacaacttcatcctagctcatgccaccgtttcagacatgtacaggaggaaatacaaggcagctcagaatggtgagcttgggatcgcatttgacgtcatctggtacgaaccaatgacaaacagcacgatcgacattgaagctaccaagagggcgcaagagtttcagctaggatggttcgcggacccgttcttcttcggagactacccggcgacgatgcgggctcgggttggagagaggctgcccaagttcaccgcagacgaggctgcccttgtcaagggggccctggacttcatgggcataaaccactacaccaccttctacacgaggcataacgacaccaacatcatcggacggctgctgaacgacaccttggcggacaccggaaccatcagcctgcgtgagtcctcatcgtgtgtgtttgcaagttcatttcaactgaaaaaaaagaaacctgaaagatga

SEQ ID NO: 122 - protein, 441 aa, Zea mays
MHEGQAVGLLSSPRFGAHLGLGAVSRSRVPACVPWWPMGRRIMKSGRRTTMQPRPALLLLVLVLGVSLRGCIAQGGGGGGGLTRGSFPKGFVFGTAAAAYQYEGAVKTDGRGQTIWDTFAHTFGKISDFSNADVAVDQYHRFEEDVQLMADMGMDAYRFSIAWSRILPNGTGQVNQAGIDHYNKVINALLSKGIQPYVTLYHWDLPQALEDRYNGWLDRQIVNDFAAYADTCFKAFGDRVKHWITLNEPHTVAVQGYDAGLHAPGRCSVLLHLYCRTGNSGTEPYIVAHNFILAHATVSDMYRRKYKAAQNGELGIAFDVIWYEPMTNSTIDIEATKRAQEFQLGWFADPFFFGDYPATMRARVGERLPKFTADEAALVKGALDFMGINHYTTFYTRHNDTNIIGRLLNDTLADTGTISLRESSSCVFASSFQLKKKKPER

SEQ ID NO: 123 - DNA, 963 bp, Zea mays
  CDS (1)..(963)
atggcgtcttcctcggtctcatcctgcctgctgcttctcctgtgcttggcggcggtggcgtccgcgcagctctcgccgacgttctacgactcgtcgtgccccaacgcgctgtccaccatcaagagcgccgtgaacgccgccgtgcagaaggagaaccgcatgggggcctccttgctcaggctgcacttccatgactgctttgtccaggggtgcgacgcgtcggtgctgcttgccgacaacgccgccacgggcttcaccggcgagcagggtgctgcgcccaacgccgggtcgctgaggggcttcgacgtcatcgccaacatcaaggcacaggtggaggcagtctgcaagcagaccgtctcctgcgccgacatcctcgccgtcgccgcccgtgattccgtcgtcgcgttgggcgggccgtcatggacggttcctctggggcggagggactcgacgacggcgagcctgtccctggcgaacagcgacctgccgcctccattcttcaacctcggccagctcataacagcgttcggcaacaagggtttcaccgcgaccgagatggccacgctctccggcgcgcacaccatcgggcaggcgcagtgcaagaacttcagggaccacatctacaacgacaccaacatcaaccagggcttcgcgagctcgctcaaggccaactgcccccggcccaccggctccggcgacggcaacctggcgccgctcgacaccaccacgccgtacagcttcgacaacgcctactacagcaacctgctgagccagaaggggctcctgcactcggaccaggagctcttcaacggcggcagcaccgacaacaccgtcaggaacttcgcgtccaactcggccgccttcagcagcgccttcgccgcggccatggtgaagatgggcaacctcagcccgctcaccggatctcagggccagatcaggcttacctgctccacagtgaactga

SEQ ID NO: 124 - protein, 320 aa, Zea mays
MASSSVSSCLLLLLCLAAVASAQLSPTFYDSSCPNALSTIKSAVNAAVQKENRMGASLLRLHFHDCFVQGCDASVLLADNAATGFTGEQGAAPNAGSLRGFDVIANIKAQVEAVCKQTVSCADILAVAARDSVVALGGPSWTVPLGRRDSTTASLSLANSDLPPPFFNLGQLITAFGNKGFTATEMATLSGAHTIGQAQCKNFRDHIYNDTNINQGFASSLKANCPRPTGSGDGNLAPLDTTTPYSFDNAYYSNLLSQKGLLHSDQELFNGGSTDNTVRNFASNSAAFSSAFAAAMVKMGNLSPLTGSQGQIRLTCSTVN

SEQ ID NO: 125 - DNA, 861 bp, Zea mays
  CDS (1)..(861)
atgtctcgctctcctcctctcctctcctctccttccgcatcacacaccacgactcccaaccgccggttggctttgctgctccgagctcttcctcttccacacccgccctctctcttgtgggtcggcggccgagtgtctgcgtcgtccacggagatcagggatcggcggcggggtatggcgagggagcgtcgggagataaagaggatagagagcgcggcggcgcggcaggtcacgttctccaagcgccgccgcggcctcttcaagaaggctgaggagctctccgtgctgtgcgatgccgacgtcgcgctcatcgtcttctcctccacgggaaagctctcccagttcgccagctccagtatgaatgagatcattgacaagtacagcacacattctaaaaacctggggaaagcagaacagccttcacttgacttgaacttagaacatagcaaatatgcaaatttgaatgagcaacttgtggaagcaagccttcgactcaggcagatgagaggtgaagaacttgagggattgagtgttgaagaactccagcaattggagaagaatctggaatctggtctgcatagggtgcttcaaacaaaggatcaacaattcttggaacagatcagcgacctcgaacaaaagagtacacaactggcagaggagaacaggcaactgaggaatcaagtatcccacatacccccagttggcaagcaatcagttgctgatactgaaaatgttatcgctgaagatgggcaatcctctgaatcagtcatgactgcgttgcattctgggagttcacaggataatgatgatggttcggatgtctctctaaaattagggctgccttgtgttgcatggaagtga

SEQ ID NO: 126 - protein, 286 aa, Zea mays
MSRSPPLLSSPSASHTTTPNRRLALLLRALPLPHPPSLLWVGGRVSASSTEIRDRRRGMARERREIKRIESAAARQVTFSKRRRGLFKKAEELSVLCDADVALIVFSSTGKLSQFASSSMNEIIDKYSTHSKNLGKAEQPSLDLNLEHSKYANLNEQLVEASLRLRQMRGEELEGLSVEELQQLEKNLESGLHRVLQTKDQQFLEQISDLEQKSTQLAEENRQLRNQVSHIPPVGKQSVADTENVIAEDGQSSESVMTALHSGSSQDNDDGSDVSLKLGLPCVAWK

SEQ ID NO: 127 - DNA, 915 bp, Zea mays
  CDS (1)..(915)
atgttcggcacgacgattcctcaaaccctaatcctttggcccctcaccatggcctatgctgacgacgcgccgccaacgccgcctcctgaggtagtagcccccgaggagcatcccgcggtcgccgaatccgccgttgccgcgcagcaggagggggcagcgacggcccaagtcgataacaagcggaagctcgaggaggctggcgccgacgcggaggcgaacggcaccggcgaggacgccaagcgcccgcgcgtggatggtgagcccgacgctgccacaggcattgagcagcagaacgatgggtcctccgtgaatgtctccgtgaatgtggaggaacccgcagctgcagaggaggataaggttgctcccaccgatggggcagcgacggatggtgataatgacacggccgctcctgctacggattcgcaggcgggttctgatgacaaaccgcttgaagcagcagctgaagctccacaaccggaaagtgatgcagcagctgttgcccaggagatctctcgtatgatcgaagtacccaacagcagggtcggtgtccttattggaaaagctggtgagacaatcaggaacttgcaaatgagctcgggtgcaaagatccaaatcaccaaggacgccgatgcggactcaaatgccctgactcgtccggttgaactagttggaacccttggaagcgttgataaagcagagctgcttattaagagtgtcatagctgaggctgaggctggcggttcccctgccttaatagctagaggatttggaagtggacagcctgggtcagagcaatttgagatgacagttcctgataacaaggttggtctcattatcggaaaaggtggtgatgcaattaaaggcatgcaaaccaaatctggtgctcgtattcagttaataccccaacatccttga

SEQ ID NO: 128 - protein, 304 aa, Zea mays
MFGTTIPQTLILWPLTMAYADDAPPTPPPEVVAPEEHPAVAESAVAAQQEGAATAQVDNKRKLEEAGADAEANGTGEDAKRPRVDGEPDAATGIEQQNDGSSVNVSVNVEEPAAAEEDKVAPTDGAATDGDNDTAAPATDSQAGSDDKPLEAAAEAPQPESDAAAVAQEISRMIEVPNSRVGVLIGKAGETIRNLQMSSGAKIQITKDADADSNALTRPVELVGTLGSVDKAELLIKSVIAEAEAGGSPALIARGFGSGQPGSEQFEMTVPDNKVGLIIGKGGDAIKGMQTKSGARIQLIPQHP

SEQ ID NO: 129 - DNA, 4590 bp, Zea mays
  CDS (1)..(4590)
atgggaactccagttggtatcatcgttggttctcatgtttgggtggaagacccaaatctagcttggatagatggagaagttattagcataaaaaacaatgaagtacatgtgcagacatcgaatgggaaaaaggttaccacagacaggtcaaaagtatttcccaaggatatggaagctccaccaggaggagttgatgatatgacaagactttcatacttacatgaacctggtgttctacagaatcttgctacccgctatgaactgaatgaaatatatacttacacaggcagcattttgattgctgtaaatccatttcaaagattgccacatctttatgatacccacatgatggaacagtacaagggtgcagattttggggaattgagtccccatgactttgctatcgcagatgttgcttacagggcaatggataatgaagggaaaagcaactctatattggtcagtggtgaaagtggtgctgggaagactgagacaacgaagatgcttatgagatatttagcacatttaggtgggcgatctggagtagaaggacgtacagtggaacaacaagttttagagtccaacccagttcttgaagcttttggtaatgctaaaactgtgcgaaataacaactcaagtcgctttggcaagtttgttgagatccaatttgacaagactggacggatctcaggagctgctatcagaacttacttgctggaaagatcacgtgtgtgccaaattaattctccagaaagaaattaccattgcttttattttctttgtgccgcaccacctgagtacactcagaggtacaagctgtctgatcctagatctttccattacctcaatcagtcgagctgtattgaggtggatggaatcaatgatgctgaagagtatttagcaacacgaagagctatggatatagttggaatcaatgaggaagagcaggaaggtatattccgggttgtagctgctgtacttcatcttggaaatataaattttgccaagggaacagaaatcgattcttctgtaatcaaggatgataaatccaggttccaccttaatatcgcagcagaacttttgaaatgtgattgccagaatttagagaaggcgctgataacacgagttatagtcacgcctgaagaagttatcactagaacacttgatcctgcttctgcagttgctagcagagacgcattagctaaaataatatactcccgattgtttgattggattgtggaaaaaattaatgtctcaattggacaggacccaaactcaaaacaattaattggagttcttgatatctatggttttgagagcttcaaagttaacagttttgaacagctatgtatcaattatacaaatgaaaagctgcaacaacattttaaccagcacgtgttcaaaatggaacaagaagagtataccagagaagagataaactggagttacatcgagtttgttgataatcaagatgtgctagacttgatagagaagaaaggtggattgattgcacttctggatgaagcatgtatgtttcctagatctacacatgagacgtttgcgcagaagctatatacaacatttaagaataacaagcggtttgccaagccaaagctttcacgcactgattttacagtagtccattatgctggcgatgtgacataccaggctgattatttcttagacaagaacaaagattatgtagtggctgaacatcaggatctgctgaatgcttcttcatgcctattcgtagctggtttattccctcctctcccacaggagacagcaaagtcttcaaaattttcatccattggatcacgttttaagcttcaacttcaatccctcatggaaactttgagctctaccgaaccccactatattagatgtgtgaagccaaataatctccttaagccagctatttttgagaatacaaatgttatacaacaactaagatgtggaggtgttctcgaagctatcaggatcagctgtgctggatatcccacaagaaaaacattttatgaatttgtcaatcgttttggtgtccttgctcctgaagttttagaagggagcaatgatgataagattgcgtgccaaaagattttggaaaaaatgggtctggagaattaccagattggaaaaacaaaggtgtttctaagagctggacagatggctgatttggatgctcgtagagctgaagtattaggaagagcagcaagaatcatacagaggcaaatacgtacatatattgcaaggaaacagtttgctgagcttaaaagatcagcaacacagctgcaatcttttgtcagaggaaccttggctcgtaagttgtatgagtgcatgaggcaggaagcagcagcagtgaaaatacaaaagaatatgcgacgccacaaagcacgggaatcttatttacaattgcaagcagctgcaatcacattgcagacaggtttaagggcaatgtctgctcgcaaagaattcaggttcagaaaggaaacaaaagctgctgtccacatccaagctcaatggcgccgccacagagactactcacattacaagaatctgcaaggagcagctcttacttaccagtgtgcctggaggcaaaggcttgccagaagggagctcaggaagctcaagatggcggcaagagaaacaggagccctaaaagaggccaaggataaacttgagaagcgtgttgaagaactcacctggcgcttaggattggagaagcgattaaggactgaccttgaggaagcaaaagcccaggaaattgctaagctgcaagagacgttgcatgatatgcagcttcaagttgaagagtcaaaggccatggtagttaaggagagggaagctgctagaaaggcaattgaagaagcacctccagtaattaaagagactcctgtgctagtcgaagacacagaaaagattaactcactgacgaccgaagttgaacaactgaaggctttgctgctaactgaaagacaagcaacagaagctgcaaaaagagaacacgctgaatctgaactgagaaatgaagaactaattaagaaatttgagagcgcagagaaaaagattgagcaacttcaggaaactgtccataggctggaggagaaagcaaccaacatggagtctgagaacaaagtgctccgtcaacaagctgttgcaatttctcctacgtcaaaatcattagctgcatatcctaagtctcctttccagctgaaaactccggagaatgggaatgctctaaatggagaagtgaagtcatcaccagatatcacccctatcttaccaaaccccaaggagcttgaggctgaagagaagccacaaaaatcacttaatgaaaagcagcaggaaaatcaagacctactgatcaagtgtgtatcacaagatctgggattctccagtggcaaacctattgcagcttgccttatctacaggtgtcttctacactggagatcattcgaagttgaaagaactggtgtttttgaccgtattattcaaacaattggctctgctattgagtcccaggacaacaatgacaagttggcatattggctctcgaattcatccacactgctgctgctgctgcaacgaacactgaaaacaactggagcagctggattcactcctcaaaggcgcaggtcatctgctgcatcttttgggagggtgttttcggggatgcgagcctcaccacaaagtgctgggcgtgcttttatgggaagtcgcttgattggaggtctaggtgaccttcgtcaagttgaagccaagtaccctgccctgcttttcaagcaacagctcacagctttccttgagaagatctatggaatgataagagacaatttgaaaaaggagatatctcctttgcttggcctttgcatccaggcaccaagaacatcccgtgcaagcctaattaaagggtcacgttcccaagcaaatgccttagctcagcaaactctgattgcacattggcagagcattgtgaaaatattgacaaattacttgaatgttttaaaagcaaattatgtcccttcagtcttaatcagcaaagtgttcactcaaatcttttcatttattaatgttcagttatttaatagtcttcttcttcgccgggagtgttgttcatttagcaatggggaatatgtgaaagctggattggcagaattagagcagtggtgcatttatgcaactgaagagtatgcaggttcttcctgggaagaattaaaacatattaggcaggctgttggattccttgtgattcatcaaaagccaaagaaaacattgaaagaaatcaccaacgatctgtgccctgtccttagcatacaacagctatatcgaatcagtacaatgtactgggatgataagtacggtacccacactgtttcatcagatgtcatctcaagtatgagagtaatgatgacagaagattctaataacgcggtcagcagttcgttcctgttggatgatgattccagcattccgttttcggtggacgacatctcgaagtcgatgacagaaatcgaggtaacagatgtcgacatgccacctctgatacgggagaattctgggttcaccttcctacaccagagaaaggactga

SEQ ID NO: 130 - protein, 1529 aa, Zea mays
MGTPVGIIVGSHVWVEDPNLAWIDGEVISIKNNEVHVQTSNGKKVTTDRSKVFPKDMEAPPGGVDDMTRLSYLHEPGVLQNLATRYELNEIYTYTGSILIAVNPFQRLPHLYDTHMMEQYKGADFGELSPHDFAIADVAYRAMDNEGKSNSILVSGESGAGKTETTKMLMRYLAHLGGRSGVEGRTVEQQVLESNPVLEAFGNAKTVRNNNSSRFGKFVEIQFDKTGRISGAAIRTYLLERSRVCQINSPERNYHCFYFLCAAPPEYTQRYKLSDPRSFHYLNQSSCIEVDGINDAEEYLATRRAMDIVGINEEEQEGIFRVVAAVLHLGNINFAKGTEIDSSVIKDDKSRFHLNIAAELLKCDCQNLEKALITRVIVTPEEVITRTLDPASAVASRDALAKIIYSRLFDWIVEKINVSIGQDPNSKQLIGVLDIYGFESFKVNSFEQLCINYTNEKLQQHFNQHVFKMEQEEYTREEINWSYIEFVDNQDVLDLIEKKGGLIALLDEACMFPRSTHETFAQKLYTTFKNNKRFAKPKLSRTDFTVVHYAGDVTYQADYFLDKNKDYVVAEHQDLLNASSCLFVAGLFPPLPQETAKSSKFSSIGSRFKLQLQSLMETLSSTEPHYIRCVKPNNLLKPAIFENTNVIQQLRCGGVLEAIRISCAGYPTRKTFYEFVNRFGVLAPEVLEGSNDDKIACQKILEKMGLENYQIGKTKVFLRAGQMADLDARRAEVLGRAARIIQRQIRTYIARKQFAELKRSATQLQSFVRGTLARKLYECMRQEAAAVKIQKNMRRHKARESYLQLQAAAITLQTGLRAMSARKEFRFRKETKAAVHIQAQWRRHRDYSHYKNLQGAALTYQCAWRQRLARRELRKLKMAARETGALKEAKDKLEKRVEELTWRLGLEKRLRTDLEEAKAQEIAKLQETLHDMQLQVEESKAMVVKEREAARKAIEEAPPVIKETPVLVEDTEKINSLTTEVEQLKALLLTERQATEAAKREHAESELRNEELIKKFESAEKKIEQLQETVHRLEEKATNMESENKVLRQQAVAISPTSKSLAAYPKSPFQLKTPENGNALNGEVKSSPDITPILPNPKELEAEEKPQKSLNEKQQENQDLLIKCVSQDLGFSSGKPIAACLIYRCLLHWRSFEVERTGVFDRIIQTIGSAIESQDNNDKLAYWLSNSSTLLLLLQRTLKTTGAAGFTPQRRRSSAASFGRVFSGMRASPQSAGRAFMGSRLIGGLGDLRQVEAKYPALLFKQQLTAFLEKIYGMIRDNLKKEISPLLGLCIQAPRTSRASLIKGSRSQANALAQQTLIAHWQSIVKILTNYLNVLKANYVPSVLISKVFTQIFSFINVQLFNSLLLRRECCSFSNGEYVKAGLAELEQWCIYATEEYAGSSWEELKHIRQAVGFLVIHQKPKKTLKEITNDLCPVLSIQQLYRISTMYWDDKYGTHTVSSDVISSMRVMMTEDSNNAVSSSFLLDDDSSIPFSVDDISKSMTEIEVTDVDMPPLIRENSGFTFLHQRKD

SEQ ID NO: 131 - DNA, 1701 bp, Zea mays
  CDS (1)..(1701)
atggctccgcttctcgctgctgccatgaaccacgctgcagcccatcctggccttaggagccacctagtaggacccaacaatgagagtttctcacggcaccacctgccgtcttcttctccacagagcagcaagcgaaggtgtaaccttagctttactacacgatctgcaagagtaggcagccaaaatggagtccaaatgttgagcccctcggaaatcccacaaagggactggttcccctctgacttcaccttcggtgccgccacttcagcgtaccaaattgaaggtgcttggaatgaagatggaaagggggaaagcaactgggatcacttctgccacaatcatccggaaaggatactggacgggagcaattcagacattggagcgaattcgtatcatatgtacaaaacggacgtcagattgctcaaggaaatgggcatggacgcatataggttctctatctcttggcccagaatactgccgaagggaaccaaagaaggaggtattaaccctgatggcatcaagtactacagaaacctcatcaacttgttgctggaaaacggcatagagccatatgtaacaattttccactgggatgtacctcaagcactagaagagaagtacggcggcttcctagataagagtcataagagcattgtagaagattacacctacttcgctaaggtgtgctttgataacttcggcgacaaggtgaagaattggttgacctttaatgagccccagacatttacttccttttcctacggaactggggtctttgccccaggtcggtgctcacctggactagactgtgcctacccaactgggaattcactcgtcgagccttacactgctggccataacattctcctagcccacgctgaggctgttgatctttacaacaagcattacaagcgcgacgacacccgcatagggcttgcgtttgacgtaatgggtcgtgtgccatacggaacatcgtttctggataaacaggccgaagaaaggtcatgggacatcaacctaggatggttcttagagccagtggttcgtggtgactaccccttctccatgagatcattggctagggaacgactacccttcttcaaggacgagcagaaggagaagctcgccggttcctataacatgttggggttaaactactacacctcacggttctccaaaaacatcgacatctcaccaaactactcacctgtgctcaacactgacgacgcctacgccagtcaagaagttaacgggcctgacgggaagcccattggtcctcctatgggaaatccatggatctacatgtaccctgagggcttgaaggatctccttatgataatgaagaacaaatacggaaacccacctatctacatcaccgagaacggaatcggggatgttgataccaaagagacacctctacccatggaggctgccttaaatgactacaaaaggctagattacatccagcgccacatcgctactcttaaggaatcaatagacttgggatcaaatgtgcaaggctacttcgcttggtctctgctggacaactttgaatggtttgccggcttcaccgaacgttatggcattgtctacgtcgaccgcaacaataactgcacgcgctacatgaaggagtctgccaagtggttgaaagagttcaacaccgcgaaaaagcccagcaagaagattcttacgccagcttga

SEQ ID NO: 132 - protein, 566 aa, Zea mays
MAPLLAAAMNHAAAHPGLRSHLVGPNNESFSRHHLPSSSPQSSKRRCNLSFTTRSARVGSQNGVQMLSPSEIPQRDWFPSDFTFGAATSAYQIEGAWNEDGKGESNWDHFCHNHPERILDGSNSDIGANSYHMYKTDVRLLKEMGMDAYRFSISWPRILPKGTKEGGINPDGIKYYRNLINLLLENGIEPYVTIFHWDVPQALEEKYGGFLDKSHKSIVEDYTYFAKVCFDNFGDKVKNWLTFNEPQTFTSFSYGTGVFAPGRCSPGLDCAYPTGNSLVEPYTAGHNILLAHAEAVDLYNKHYKRDDTRIGLAFDVMGRVPYGTSFLDKQAEERSWDINLGWFLEPVVRGDYPFSMRSLARERLPFFKDEQKEKLAGSYNMLGLNYYTSRFSKNIDISPNYSPVLNTDDAYASQEVNGPDGKPIGPPMGNPWIYMYPEGLKDLLMIMKNKYGNPPIYITENGIGDVDTKETPLPMEAALNDYKRLDYIQRHIATLKESIDLGSNVQGYFAWSLLDNFEWFAGFTERYGIVYVDRNNNCTRYMKESAKWLKEFNTAKKPSKKILTPA

SEQ ID NO: 133 - DNA, 852 bp, Zea mays
  CDS (1)..(852)
atgccccgggcgtgggctgaagcgcaagtgggctgcatcgactccgccactcggatggggcggaagaagcggctcgagagcgagtacgagctcggcgccgagatcggccagggcaagttcggctccgtccggatctgccgcgctaaggtcggcggcgacgagttcgcctgcaaggagctgcccaagaacggcgaggagacggtgcaccgcgaggtggagatcatgcagcacctctcgggccacccgggcgtcgtcacgctcagggccgtcttcgaggatgccgacaagttttacctcgtcatggagctctgcagcggggggaggttgctcgatgagatcgccagggaggggaagttttccgagcagcgtgctgccattgtgatcaaggatctcatggcagtgctcaagtactgccacgagatgggtgttgtgcacagggacgttaagccggagaatattttgcttaccaaggctgggaaagtgaagcttgctgatttcggactcgctgcacgggtcactaatggtcagaaaatgtttggtgttgctgggagccctgcatatgtggcacctgaagttctttctggaagctattcggagaaggttgatatatggggtgccggtgtgctactacatgtactactacttggttcacttccatttcaagggggctctctggacgccgttttcgagtccataaagacacttgaacttgatttcagcagcaccccactggaatcaatatcagttcttggacgggatcttattgggcgaatgctaaatcgagatgtctcttgcagaatgactgctgatgaagttcttagtcacccatgggtcgtattttacacagaatga

SEQ ID NO: 134 - protein, 283 aa, Zea mays
MPRAWAEAQVGCIDSATRMGRKKRLESEYELGAEIGQGKFGSVRICRAKVGGDEFACKELPKNGEETVHREVEIMQHLSGHPGVVTLRAVFEDADKFYLVMELCSGGRLLDEIAREGKFSEQRAAIVIKDLMAVLKYCHEMGVVHRDVKPENILLTKAGKVKLADFGLAARVTNGQKMFGVAGSPAYVAPEVLSGSYSEKVDIWGAGVLLHVLLLGSLPFQGGSLDAVFESIKTLELDFSSTPLESISVLGRDLIGRMLNRDVSCRMTADEVLSHPWVVFYTE

SEQ ID NO: 135 - DNA, 342 bp, Zea mays
  CDS (1)..(342)
  misc_feature (92)..(334): n at positions 92, 199 and 334 is a or g or c or t/u
atgcgggtcgaccgtcgctgccagccagccacagcaagctccgcacgaccgccggtccgccgcctaccagagcgagctcatctctcagccgncgccggggggcctcctcgtcacgccggcgcagcccgcgcttcgttccaccgtagtttgcccggccgtgctggggcaaaaaaaggtccgggcccacgtgttcccaganggagcgagaggacgtcgatcggtcaggccatcagggaccagaccagacaaagccaaaggggccgcggatcggtaggcggccggcgcggatcggaggaagaagggaggaggaggccatccagttggagtacttggnagaggtga

SEQ ID NO: 136 - protein, 113 aa, Zea mays
  misc_feature (31)..(31): Xaa can be Ala or Asp or Gly or Val
  misc_feature (67)..(67): Xaa can be Arg or Gly or Trp
  misc_feature (112)..(112): Xaa can be any amino acid
MRVDRRCQPATASSARPPVRRLPERAHLSAXAGGPPRHAGAARASFHRSLPGRAGAKKGPGPRVPRXSERTSIGQAIRDQTRQSQRGRGSVGGRRGSEEEGRRRPSSWSTWXR

SEQ ID NO: 137 - DNA, 867 bp, Zea mays
  CDS (1)..(867)
  misc_feature (4)..(62): n at positions 4, 5 and 62 is a or g or c or t/u
atgnnggtcgacttcgctgtcgacgatttcgtagcacaccaaggagagtacgtggaggagcnagccatggcttcatcggtggccgccgcggcgagcacattcctgggcacccgcctggcggacccggcgccacagaacgggcgcatcgtggcccggttcgggttcgggttgggcggcaaggcgaagcctgccccgaagaaggtggcgaagacatcgacctcctctgaccggccgctgtggttccccggcgccgtggcgcccgactacctggacggctcgctggtcggcgactacgggttcgacccgttcggtctcgggaagcccgtggagtacctgcagttcgagttggactcgctggaccagaacctggccaagaatgaggccggcggcatcatcggcacccggttcgagtcctccgaagtcaagtccaccccgttgcagccctacagcgaggtgttcggcctccagcggttccgcgagtgcgagctcatccacggccgctgggccatgctcgccaccctcggcgccctctccgtcgagtggctcaccggcgtcacctggcaggacgccggcaaggtggagctggtggacgggtcctcctacctgggccagccgctgccgttctccatctcgacgctcatctggatcgaggtgctcgtgatcggctacatcgagttccagcgcaacgccgagctcgacccggagaagaggctgtaccccggcggctcctacttcgacccgctcggcctggcggccgaccctgagaagaaggagcggctgcagctggcggagatcaagcacgcgcggctcgccatggtcgccttcctcggcttcgccgtgcaggccgccgccaccggcaaggggtga

SEQ ID NO: 138 - protein, 288 aa, Zea mays
  misc_feature (2)..(2): Xaa can be any amino acid
  misc_feature (21)..(21): Xaa can be Arg or Gln or Leu or Pro
MXVDFAVDDFVAHQGEYVEEXAMASSVAAAASTFLGTRLADPAPQNGRIVARFGFGLGGKAKPAPKKVAKTSTSSDRPLWFPGAVAPDYLDGSLVGDYGFDPFGLGKPVEYLQFELDSLDQNLAKNEAGGIIGTRFESSEVKSTPLQPYSEVFGLQRFRECELIHGRWAMLATLGALSVEWLTGVTWQDAGKVELVDGSSYLGQPLPFSISTLIWIEVLVIGYIEFQRNAELDPEKRLYPGGSYFDPLGLAADPEKKERLQLAEIKHARLAMVAFLGFAVQAAATGKG

SEQ ID NO: 139 - DNA, 414 bp, Zea mays
  CDS (1)..(414)
atgatcggcttgggtcgcgtcgagaacttgagattgcgatttgggagttgcgggagagaaaggaagagatgggccagagcaaggcggagtttttggagcagttcggtggggactacggttacccggacgcgcccaggggcatcgacgatctgcgggccgccgagttcaagcggcctggaagggatggtttacctggaccatgctggtgcgacactgtactcagaggcacagatgacggatgttgctagagaccttatgtctaatgtctatgggaatcctcatagtcagaacgatccaagcatggctacaagtgatattgttacttctgcgcggcatcaggtcctaaaatacttcaatgcatcaccaaaggactacaaatgtatatttacatcagcggcaacagcagctctgtga

SEQ ID NO: 140 - protein, 137 aa, Zea mays
MIGLGRVENLRLRFGSCGRERKRWARARRSFWSSSVGTTVTRTRPGASTICGPPSSSGLEGMVYLDHAGATLYSEAQMTDVARDLMSNVYGNPHSQNDPSMATSDIVTSARHQVLKYFNASPKDYKCIFTSAATAAL

SEQ ID NO: 141 - DNA, 423 bp, Zea mays
  CDS (1)..(423)
  misc_feature (4)..(420): n at positions 4, 5, 375, and 420 is a or g or c or t/u
atgnngaacaagatcaaccgccaggtcaccttcgccaagcgccgcaacggcctgctcaagaaggcgtacgagctctccgtgctctgcgacgccgaagtcgcgctcatcatcttctccaaccgcggcaagctctacgagttctgcagcggacagagcattaccaaaacacttgagaggtatgaaaaaaacagttatggaggaccagatactgctgtacagaacaaggagaacgagttagtccagagcagtcgtaatgagtacctcaagctgaaagcgagggtggataatttacagaggactcagaggaatttgcttggtgaagatctggggtcacttggtgtcaaagagcttgagcagcttgagaagcaacttganttcatccttaaggcacataagatccacaaggacacaacatatgcntga

SEQ ID NO: 142 - protein, 140 aa, Zea mays
  misc_feature (2)..(2): Xaa can be any amino acid
  misc_feature (125)..(125): Xaa can be Asp or Glu
MXNKINRQVTFAKRRNGLLKKAYELSVLCDAEVALIIFSNRGKLYEFCSGQSITKTLERYEKNSYGGPDTAVQNKENELVQSSRNEYLKLKARVDNLQRTQRNLLGEDLGSLGVKELEQLEKQLXFILKAHKIHKDTTYA

SEQ ID NO: 143 - DNA, 426 bp, Zea mays
  CDS (1)..(426)
atgaggaggaggacgacgatggttggaggccgtcccctcttcgtgctcttcggctcctccatcgtgcagtacagcttcagcaacggcggatggggcgctgtgcttgccgacatctacgcccgcaaggctgatatcctgctaagaggatatactggctggaacacaaggcgggctgttcaagtcatggataaagtgttccctaaggattcagcagtgcagccgtctctggtgatagtttactttggtgggaacgactccatcgctgcccattcctccggcctcgggcctcatgtgccgctagacgagtacatagccaacatgagaaagatcgcggacgacctcaagagcctctccgagaagacgcgggtcattttcctgagctgcccgcctctgaacgaggagatgcttcggaagtcaaccagttga

SEQ ID NO: 144 - protein, 141 aa, Zea mays
MRRRTTMVGGRPLFVLFGSSIVQYSFSNGGWGAVLADIYARKADILLRGYTGWNTRRAVQVMDKVFPKDSAVQPSLVIVYFGGNDSIAAHSSGLGPHVPLDEYIANMRKIADDLKSLSEKTRVIFLSCPPLNEEMLRKSTS

SEQ ID NO: 145 - DNA, 1029 bp, Zea mays
  CDS (1)..(1029)
atgcataatacagcgaaggtaactcacatggcaacttccatgggttgtctcgtcttgctctgccttgtttcttctctccttcccagtgccgtccttggccacccatggggtggcttgttcccacagttctatgaccattcgtgccccaaggcgaaggagattgtgcagtccattgtggcacaggctgtggccaaggagaccaggatggcggcatctttagtcagactgcatttccatgactgctttgtcaagggctgcgatgcttcggtgctgttggacaacagcagcagcatagttagtgagaaagggtccaacccgaacaggaactccctcagggggtttgaggtgatcgaccagattaaggctgctcttgaggctgcctgcccaggcacagtctcctgtgccgacattgttgcccttgcggctcgtgattccaccgccctggttggtggaccatactgggacgtgccacttggccggagagactcgctcggtgcaagcatccagggctccaacaatgacatcccagcccccaacaacacactccccactatcatcaccaagttcaagcgccagggcctcaatgttgttgatgttgtcgccctctcaggtggtcacaccattggtatgtctcggtgcactagtttccggcagaggctatacaaccagacaggcaatggcatggctgacagcacactggatgtatcctacgccgcaaagctgaggcagggatgcccccgctctggtggtgacaacaacctcttccccttggacttcatcacccctgccaagtttgacaatttttactacaagaacctcctggccggcaagggccttctaagctctgatgagattctgttaaccaagagcgctgagacagcggccctcgtgaaggcatatgctgctgatgtcaatctcttcttccagcactttgcacagtctatggtgaatatgggaaacatctcgccactgacagggtcacaaggtgagatcaggaagaactgcaggaggctcaacaatgaccactga

SEQ ID NO: 146 - protein, 342 aa, Zea mays
MHNTAKVTHMATSMGCLVLLCLVSSLLPSAVLGHPWGGLFPQFYDHSCPKAKEIVQSIVAQAVAKETRMAASLVRLHFHDCFVKGCDASVLLDNSSSIVSEKGSNPNRNSLRGFEVIDQIKAALEAACPGTVSCADIVALAARDSTALVGGPYWDVPLGRRDSLGASIQGSNNDIPAPNNTLPTIITKFKRQGLNVVDVVALSGGHTIGMSRCTSFRQRLYNQTGNGMADSTLDVSYAAKLRQGCPRSGGDNNLFPLDFITPAKFDNFYYKNLLAGKGLLSSDEILLTKSAETAALVKAYAADVNLFFQHFAQSMVNMGNISPLTGSQGEIRKNCRRLNNDH

SEQ ID NO: 147 - DNA, 1125 bp, Zea mays
  CDS (1)..(1125)
atggaagctggcaggcataaactgtggggactggggagctcgttctctccgccggcccgctcactctccctggtctctcgtctcctccactccaagagaacaggcgccggcgaaaggcgggagcagcgcgctgcccattcaccgccccctgatttcttgggagttgcggatcggtctccggggcagcgtggaacggctgggcccctcggatcgccggagatgctgccctacgcgacggcggcggaggcggaggcggcgcttggccggcccatgacgcccgccgaggcgctgtggttccggtacaccgcgggggtgtccgactaccacctctactgctgcaacatcctcttcctcttcgtcgtcttcacggtggccccgcttcccatcgcgctcctcgagctccgggccccggccgcggtctcgccgtacaaactgcagccgcgggtgcggctctccagggccgagttcgtccggtgctacaaggacgtcctccgcatcttcttcctcgtcatcggcccgctccagctcgtctcctacccggcggtcaagtttgtgggaattcacacgaagttgcctttgccgtcccttgcggagttggcagcacagctactggtgtacttccttgttgaggactacctcaattactggatccacaggtttctccacggggagtgggggtaccagaatatccaccgtgttcaccatgagttcactgcgccaataggattcgcagctccatatgcacactgggctgaggtgctgatactcggcatcccctccttcgtcgggccagccattgttccaggccacatgatcacattctggctctggattatactccgtcaggtggaggctatcgagacacatagcggctttgatttcccattcaccccgacaaagtatattccattctatggaggagcagaataccatgactatcatcattatgtaggaggccagagccaaagcaattttgcttctgttttcacttactgtgattacttatatggcactgacaaaggttacagattccacaaaacatacctagcaaagctgaaggatctggggcataatgatggcgagaaaggagacggcagcggacccagctatgtgaaactggattga

SEQ ID NO: 148 - protein, 374 aa, Zea mays
MEAGRHKLWGLGSSFSPPARSLSLVSRLLHSKRTGAGERREQRAAHSPPPDFLGVADRSPGQRGTAGPLGSPEMLPYATAAEAEAALGRPMTPAEALWFRYTAGVSDYHLYCCNILFLFVVFTVAPLPIALLELRAPAAVSPYKLQPRVRLSRAEFVRCYKDVLRIFFLVIGPLQLVSYPAVKFVGIHTKLPLPSLAELAAQLLVYFLVEDYLNYWIHRFLHGEWGYQNIHRVHHEFTAPIGFAAPYAHWAEVLILGIPSFVGPAIVPGHMITFWLWIILRQVEAIETHSGFDFPFTPTKYIPFYGGAEYHDYHHYVGGQSQSNFASVFTYCDYLYGTDKGYRFHKTYLAKLKDLGHNDGEKGDGSGPSYVKLD

SEQ ID NO: 149 - DNA, 966 bp, Zea mays
  CDS (1)..(966)
atggcggtggccctgatgacgacgacgtgcttccatggcgcgacggcgcagctgtgcgaggactactatgacagcacctgcccggacgcctacgacatcgtgaagcaggtgctcgtcgacgcagtgcagtcggacacccgcatcttcggcagcctcatccgcctgcacttccacgactgcttcgtccagggctgcgacgcctcgcttctgctggacagcgtcccggggatgccgtcggagaagacgtcggcgcccaacaacggctcagcgcgcgggttcggggtggtggacgccgccaaggctgccctggagagcgcctgccctggtgttgtctcctgcgctgacatcctcgccatcgccgcagagatctcagtcgagctgtcgggaggccccagctggggtgtgcttctgggcaggctggacagcaagacctccgacttcaacggatccctggacctcccagagcccaccgacaacctcaccatacttcagcagaagttcagcaacctcagtctcaacgatgtcgacctggtcgccctttcaggggggcacacgttcggccgggtccaatgcaagttcatcacggaccggctctacaacttcagcgggacgaacatgcccgacccgacgctggacgcctcctaccgagccttcctgacacagagatgccccaggaacggcgaccccacagccctgaacgacctggacccgacgaccccggacaccttcgacaacaactactacaccaacatcgaggtgaaccgaggcatcctcaactccgaccaggagctcaagtcgtcgcccctagcgcagggcaccacggcgcccatcgtcgaccagttcgcggccagccaagacgacttcttcgcgagcttcgcgcagtccatgatcaacatggggaacatcaagccgctcacggacccgtccagaggagaagtccgcaccaactgcagaagggtcaactga

SEQ ID NO: 150 - protein, 321 aa, Zea mays
MAVALMTTTCFHGATAQLCEDYYDSTCPDAYDIVKQVLVDAVQSDTRIFGSLIRLHFHDCFVQGCDASLLLDSVPGMPSEKTSAPNNGSARGFGVVDAAKAALESACPGVVSCADILAIAAEISVELSGGPSWGVLLGRLDSKTSDFNGSLDLPEPTDNLTILQQKFSNLSLNDVDLVALSGGHTFGRVQCKFITDRLYNFSGTNMPDPTLDASYRAFLTQRCPRNGDPTALNDLDPTTPDTFDNNYYTNIEVNRGILNSDQELKSSPLAQGTTAPIVDQFAASQDDFFASFAQSMINMGNIKPLTDPSRGEVRTNCRRVN

SEQ ID NO: 151 - DNA, 1077 bp, Zea mays
  CDS (1)..(1077)
atgacgaagcggcactgcttgcgcttcaccaccgtcctggcgacgacgcttctctccgccaccgccgcctgcctcgacgtcggcttctacgacaggacatgccccactgccgagaccatcgtgcagcagaccgtggcggccgcgttcaggaacaactccggcgtcgctccggcgctgatccgcatgcacttccatgactgctttgtcaggggctgcgatggctcggtgctgatcgacacggtaggcaacctgacggcggagaaggacgcgccacccaacaaccccagcctccggttcttcgacgtggtcgaccgtgccaaggcgtcactggaggctcagtgccccggcgtggtctcctgcgccgacgtgctcgccttcgcggccagggacagcgtcgtgctctccggtggcctcggctaccaggtgccgggcggacgccgtgacgggcggatatccaatgacaccgaagccctcaacaacctgcctccgccgttcttcaacgccaccgagctggcagacaggttcgcctccaagaacctcactatcgaggacctggtcgtgctctcgggcgcgcacaccatcggcgtctcgcactgcagcggcttcgccggcccgacagacctgaacggccccgttgaccggctctacaacttcagctcgcctgacgggattgacccgacgctgagcaaagcctacgcatttcttctcaagagcatctgcccggccaacaccagccagttcttcccgaacacgacggtgttcatggacctcatcacgccggaaaggtttgacaacaagtactacgtcggcctgaccaacaacctgggcctcttcaagtcagacgtggcgctgctgaccaacgcgacgatgaaggccctggtcgactccttcgtgcgcagcgaggcgactttcaggaccaagtttgccaggtccatgatcaagatggggcagatcgaggtgctgacggggacgcagggcgagatcaggcgcaactgcagggtcatcaaccccgttagtgccaccgatgatgtcgtcctcgcccgcccatcaggattcactggagtggctgcgagctga

SEQ ID NO: 152 - protein, 358 aa, Zea mays
MTKRHCLRFTTVLATTLLSATAACLDVGFYDRTCPTAETIVQQTVAAAFRNNSGVAPALIRMHFHDCFVRGCDGSVLIDTVGNLTAEKDAPPNNPSLRFFDVVDRAKASLEAQCPGVVSCADVLAFAARDSVVLSGGLGYQVPGGRRDGRISNDTEALNNLPPPFFNATELADRFASKNLTIEDLVVLSGAHTIGVSHCSGFAGPTDLNGPVDRLYNFSSPDGIDPTLSKAYAFLLKSICPANTSQFFPNTTVFMDLITPERFDNKYYVGLTNNLGLFKSDVALLTNATMKALVDSFVRSEATFRTKFARSMIKMGQIEVLTGTQGEIRRNCRVINPVSATDDVVLARPSGFTGVAAS

SEQ ID NO: 153 - DNA, 1095 bp, Zea mays
  CDS (1)..(1095)
atggcagcaatggcggctgctacttcttctaggcgccctgcagctgctctgctggtcctggcagcagccgtcgtggccctggcggccgagggggccaggtacccgccgctggcgccgggcctgtcgttcgacttctacaagaagagctgccccaaggcggagtccatcgtgcgggagttcctggcgtcggcggtccggcagaacgtggggctcgccgcggcgctgatccggctccacttccacgactgcttcgtgcagggctgcgacgcctccatcctgctggacgccacgcccacccagcccagcgagcagcagtcgccgcccaacctcacgctccgccccgccgcgttcaaggccgtcaacgacatccgcgcccgcctcgaccaggcctgcggccgcgtcgtctcctgcgccgacatcgtcgcgctcgccgcacgtgaatccgtcgccctgggtggcggcccggcgtacaagttgccactgggcaggcgcgacgggctggcgccggcatcgaacgccgccgtcctagcggcgctcccaccgccgacgtccaaggtgccgacgctgctgtccttcctggcgaagatcaacctggacgtgacggacctggtggcgctgtcgggcgggcacacggtgggcatcgcgcactgcagctccttcgacaaccggctgttcccgacgcaggacccgacgctgaacaagttcttcgcggggcagctgtaccggacctgcccgaccaacgcgacggtgaacacgacggccaacgacgtccgcacgcccaacgccttcgacaacaagtactacgtggacctgctcaaccgggagggcctcttcacgtcggaccaggacctgctgaccaacgccaccacgcgccccatcgtcacgcgcttcgccgtcgaccaggacgccttcttccaccagttcgtctactcctacgtcaagatggggcaggtcaacgtgctcacgggcgcccagggacaggtccgcgccaactgctccgcgcgcaacggcgccgctgctggtgacagtgacctgccgtggtcgtccgtcgtcatcgagaccgtcgcggacgccgccggtagcctcgtgctctga

SEQ ID NO: 154 - protein, 364 aa, Zea mays
MAAMAAATSSRRPAAALLVLAAAVVALAAEGARYPPLAPGLSFDFYKKSCPKAESIVREFLASAVRQNVGLAAALIRLHFHDCFVQGCDASILLDATPTQPSEQQSPPNLTLRPAAFKAVNDIRARLDQACGRVVSCADIVALAARESVALGGGPAYKLPLGRRDGLAPASNAAVLAALPPPTSKVPTLLSFLAKINLDVTDLVALSGGHTVGIAHCSSFDNRLFPTQDPTLNKFFAGQLYRTCPTNATVNTTANDVRTPNAFDNKYYVDLLNREGLFTSDQDLLTNATTRPIVTRFAVDQDAFFHQFVYSYVKMGQVNVLTGAQGQVRANCSARNGAAAGDSDLPWSSVVIETVADAAGSLVL

SEQ ID NO: 155 - DNA, 837 bp, Zea mays
  CDS (1)..(837)
atgggcaagcaaacatctccggcagccatggcgtccactgtaacagccgccaatagcagccatggaagcgccctgcgtacccgtaccgcctccccaaggccggtcgcgggctggagctgcagacgcacgctttccacgcctgcacaccaccaccacgcgcggtcgtcacccagagctcgggttgtcgccgtccgagccgccggcacccagcgggcgacctggttgcccggactggacccgcccccatacctcgacggcacactaccaggtgacttcggcttcgaccccctgggcctcggcgaggagcccgaagccttgaagtggtacgttcaggccgagctcgtgcactgccggttcgccatggcaggggtcgccggcatccttttcactgacttgctccgcgtatcagggaacagcgacctccccgtgtggttcgaagcaggcgcggcgaaattcgacttcgcgaacaccacggcgctcttcttcgtccagctcttcttgatggggttcgctgaaaccaagaggtacatggacttcaaaaatccaggatcgcaagcagaggaagggacattcatagggttagaggctgcactcgcaggtcaacagccaggctaccccgggggtccactgttcaatccactaggactcgcaaaggatatagagaatgctcatgacgagaagctcaaagaaatcaagaacgggaggttggcaatggtagccatgcttggcttcatggtgcaagcatccgtaactcatgccggccccatcgacaatctcttgacacacctttcggacccgttcaacaaaaatatcattcacacattctcctcttcctga

SEQ ID NO: 156 - protein, 278 aa, Zea mays
MGKQTSPAAMASTVTAANSSHGSALRTRTASPRPVAGWSCRRTLSTPAHHHHARSSPRARVVAVRAAGTQRATWLPGLDPPPYLDGTLPGDFGFDPLGLGEEPEALKWYVQAELVHCRFAMAGVAGILFTDLLRVSGNSDLPVWFEAGAAKFDFANTTALFFVQLFLMGFAETKRYMDFKNPGSQAEEGTFIGLEAALAGQQPGYPGGPLFNPLGLAKDIENAHDEKLKEIKNGRLAMVAMLGFMVQASVTHAGPIDNLLTHLSDPFNKNIIHTFSSS

SEQ ID NO: 157 - DNA, 570 bp, Zea mays
  CDS (1)..(570)
  misc_feature (522)..(567): n at positions 522 and 567 is a or g or c or t/u
atgttgcatcgggccggtcgagccggagaggaaaagctagctagcagctaccagctctcggccggcggtggtagtctgcctgcagctggggttagctgcaagggttgggagctagccatggggaggggtcgggtggagctgaagcggatcgagaacaagatcaaccgccaggtcaccttcgccaagcgccgcaacggcctgctcaagaaggcgtacgagctctccgtgctctgcgacgccgaagtcgcgctcatcatcttctccaaccgcggcaagctctacgagttctgcagcggacagagcattaccaaaacacttgagaggtatgaaaaaaacagttatggaggaccagatactgctgtacagaacaaggagaacgagttagtccagagcagtcgtaatgagtacctcaagctgaaagcgagggtggataatttacagaggactcagaggaatttgcttggtgaagatctggggtcacttggtgtcaaagagcttgagcagcttgagaagcaacttganttcatccttaaggcacataagatccacaaggacacaacatatgcntga

SEQ ID NO: 158 - protein, 189 aa, Zea mays
  misc_feature (174)..(174): Xaa can be Asp or Glu
MLHRAGRAGEEKLASSYQLSAGGGSLPAAGVSCKGWELAMGRGRVELKRIENKINRQVTFAKRRNGLLKKAYELSVLCDAEVALIIFSNRGKLYEFCSGQSITKTLERYEKNSYGGPDTAVQNKENELVQSSRNEYLKLKARVDNLQRTQRNLLGEDLGSLGVKELEQLEKQLXFILKAHKIHKDTTYA

SEQ ID NO: 159 - DNA, 765 bp, Zea mays
  CDS (1)..(765)
  misc_feature (49)..(49): n at position 49 is a or g or c or t/u
atggcatcaacattcacgagctcaagcagtgttcttaccccaacaacantccttggccagactaaagcctcaagctttaacccccttcgtgatgttgtctctctcggatctcccaagtacactatgggaaatgatctttggtatggacctgacagagtgaagtacttaggacccttttccgttcaaactccgtcttacctcaccggagaattccctggcgattatggttgggacaccgccggtttatccgcagaccctgaagcctttgccaaaaacagagctcttgaggtgatccatgggagatgggcaatgttgggagcttttggttgcataacccctgaagttcttcaaaagtgggtccgtgtggacttcaaagaaccagtctggttcaaagccggttcacaaatcttctccgaaggcggtttggactacttaggcaacccaaacctagtccatgctcagagcattttagccgtccttggcttccaagtcatcctcatgggtttggttgaaggtttccgcatcaacggtcttgatggtgttggcgaaggcaacgacttgtaccccggtgggcaatactttgacccgttgggtctcgctgatgatccagttacttttgctgagcttaaggtgaaagagatcaagaacggaagattggctatgttctctatgtttggcttctttgttcaagccattgttactggaaaaggtcctttggagaatctccttgaccatcttgacaaccctgttgctaacaatgcgtga

SEQ ID NO: 160 - protein, 254 aa, Zea mays
  misc_feature (17)..(17): Xaa can be Ile or Leu or Val or Phe
MASTFTSSSSVLTPTTXLGQTKASSFNPLRDVVSLGSPKYTMGNDLWYGPDRVKYLGPFSVQTPSYLTGEFPGDYGWDTAGLSADPEAFAKNRALEVIHGRWAMLGAFGCITPEVLQKWVRVDFKEPVWFKAGSQIFSEGGLDYLGNPNLVHAQSILAVLGFQVILMGLVEGFRINGLDGVGEGNDLYPGGQYFDPLGLADDPVTFAELKVKEIKNGRLAMFSMFGFFVQAIVTGKGPLENLLDHLDNPVANNA

SEQ ID NO: 161 - DNA, 1164 bp, Zea mays
  CDS (1)..(1164)
atgataccttctgtgaggatctctcctggctatgcagccttctctggctccagcctacgcttaaaattacattcaattccatccatctctagtctcaaaccctccaaatatgtggtctcctcgctgaaaccactctacctagcaccgctagatggtccacacacttctgagcttaagtcttggagacaaccacttgagttccgttgtgctgcttctgctgccgatgacaaggagtcaaagactcaggtggtgccagttcagttggaaggcgcacagaggttaaagatctccatctatttcgcgacctggtgggcgcttaatgtgatatttaacatttacaacaagaaggttctcaatgctttcccttacccctggctcacctccacactctcccttgcctgcggctctgcgatgatgcttttctcgtgggccactcgtcttgttgaggcccccaagaccgacctagacttctggaaagttcttttcccggttgctgtggcacatacaattggccatgttgctgcgacagtgagcatgtctaaggtggcagtgtcattcacacacataattaaaagtgcagaacctgcattcactgttttggtgtcaaagttcctccttggggagacgtttccagttccagtctatctttctcttcttccaatcattggtggttgtgctctagctgctgtcacagagctgaactttaatatggttggatttatgggtgctatgatatccaaccttgcatttgttttccgcaacatcttctcgaagaggggcatgaaggggaagtccgtcagtggcatgaattactatgcttgcctgtcaataatgtcgctggtcatactgactccatttgctatagctatggaaggtcctcagatgtgggctgctggttggcaaaaggctgttgccgaagttggacccaatgttgtctggtggatcgctgcacagagcgtgttctatcacttatataaccaggtgtcctacatgtctctcgatcagatctctccattgacgtttagcattggcaatacaatgaaacgtatatcagtgattgtttcatctataattatcttccacacgcctgtccgccctgtcaatgcactgggagctgccattgccatccttggcacattcctgtactctcaggcaaaggcgtga

SEQ ID NO: 162 - protein, 387 aa, Zea mays
MIPSVRISPGYAAFSGSSLRLKLHSIPSISSLKPSKYVVSSLKPLYLAPLDGPHTSELKSWRQPLEFRCAASAADDKESKTQVVPVQLEGAQRLKISIYFATWWALNVIFNIYNKKVLNAFPYPWLTSTLSLACGSAMMLFSWATRLVEAPKTDLDFWKVLFPVAVAHTIGHVAATVSMSKVAVSFTHIIKSAEPAFTVLVSKFLLGETFPVPVYLSLLPIIGGCALAAVTELNFNMVGFMGAMISNLAFVFRNIFSKRGMKGKSVSGMNYYACLSIMSLVILTPFAIAMEGPQMWAAGWQKAVAEVGPNVVWWIAAQSVFYHLYNQVSYMSLDQISPLTFSIGNTMKRISVIVSSIIIFHTPVRPVNALGAAIAILGTFLYSQAKA

SEQ ID NO: 163 - DNA, 687 bp, Zea mays
  CDS (1)..(687)
atggcgagggagaggcgggagataaagaggatagagagcgcggcagcgaggcaggtcacgttctccaagcgccgccgcggcctcttcaagaaggcccaggagctctccgtgctgtgcgatgccgacgtcgcgctcatcgtcttctcctccacggggaagctctcccagttcgccagctccagtatgaatgagataattgacaagtacaacacgcattctaaaaacctggggaaaacagaacagccttcgctggacttgaacttagagcatagcaaatatgcaaatttgaatgagcaacttgcggaagcaagccttcgactcaggcagatgagaggtgaagaacttgagggattgaatgttgaagaactccagcagttggagaagaacctggaatctggtctgcatagggtgcttcaaacaaaggattctcaattcttggaacagatcaatgacctcgaacgtaagagtacgcagctggcagaggagaacatgcaactgagaaatcaagtatcccagatacccccagctggcaagcaagcagttgctgatactgaaaatgttattgctgaagaagggcaatcctctgaatcagtgatgactgcgttgcactctgggagttcacaggataatgatgatggttcggatgtatctctaaagttagggctgccttgcgttgcatggaagtga

SEQ ID NO: 164 - protein, 228 aa, Zea mays
MARERREIKRIESAAARQVTFSKRRRGLFKKAQELSVLCDADVALIVFSSTGKLSQFASSSMNEIIDKYNTHSKNLGKTEQPSLDLNLEHSKYANLNEQLAEASLRLRQMRGEELEGLNVEELQQLEKNLESGLHRVLQTKDSQFLEQINDLERKSTQLAEENMQLRNQVSQIPPAGKQAVADTENVIAEEGQSSESVMTALHSGSSQDNDDGSDVSLKLGLPCVAWK

SEQ ID NO: 165 - DNA, 1134 bp, Zea mays
  CDS (1)..(1134)
atgggccgtgtccttctcgggaagatggtaatgggggccgcgtccgtcggcacgctgctcgtcgcgctcgccgtcctcgctccggcggtgatgacgcagagctgcgacgacgagctgccggctcagctcgccggcaacttctcggggctcgcctgcgcccccgtctggaacagcttcgtgctccggtacgcgcaggacaaggacaacgtgctgcgggtggtgctgtcgaccatgtacagcacggggtgggtggggatggggttctccaagaacggcctcatggtggactccagcgccatggtggggtggatcggcaagacggggctcccgcacatcaagccgttctcgctggggggcaagaccccctcccaggtggtcgcggaccagggcttcctcgtctccagcgacaaccacaagcccaccgtgctcgtgcagcaggccaagatctacctcgccttccagctcagcttcaccgagccgctcaggcgccagaacgtgctcctcgccgtcggctccgccatccccgtcaacgaccgcctcgccgagcaccaggacaagacctccatcgtgtttgatttcaccacaggcagctcatcaggctcgtcatccttcccggaaggtctgaaaaggacccacggggcgctcaacctgttcgcctggggcgtgctactgccgatcggcgccatcgtcgcaaggtactgcaggagatgggaccctctgtggttctacctccacgccggcatccagttcgtggggttcatcctgggcctagccggcgtcgtggctggagtatccttgtacagcaagatccaggccgacgtccccgcgcacaggggccttggcatattcgtgctcgtgcttgccattttgcagatcctggcgattttcctgaggcccaacaaggactccaagtaccgcaagttctggaactggtaccaccactgggtcggcaggctcgccctcttctttgcagccatcaacattgtgctcgggatcaaggtcggcggagcaggcaactcttggaagatcggctacggtttcaacctggccgtccttctgatcaccatcgtcaccctggaagtcctgctctggacgaggtggaaaaacagcaccggttccacgggggcatattga

SEQ ID NO: 166 - protein, 377 aa, Zea mays
MGRVLLGKMVMGAASVGTLLVALAVLAPAVMTQSCDDELPAQLAGNFSGLACAPVWNSFVLRYAQDKDNVLRVVLSTMYSTGWVGMGFSKNGLMVDSSAMVGWIGKTGLPHIKPFSLGGKTPSQVVADQGFLVSSDNHKPTVLVQQAKIYLAFQLSFTEPLRRQNVLLAVGSAIPVNDRLAEHQDKTSIVFDFTTGSSSGSSSFPEGLKRTHGALNLFAWGVLLPIGAIVARYCRRWDPLWFYLHAGIQFVGFILGLAGVVAGVSLYSKIQADVPAHRGLGIFVLVLAILQILAIFLRPNKDSKYRKFWNWYHHWVGRLALFFAAINIVLGIKVGGAGNSWKIGYGFNLAVLLITIVTLEVLLWTRWKNSTGSTGAY

SEQ ID NO: 167 - DNA, 840 bp, Zea mays
  CDS (1)..(840)
atgcctgtcgacgatttcgtcctggtctctcgtctcctccactccaagagaacaggcgccggcgaaaggcgggagcagcgcgctacccattcaccgccccctgatttcttgggagttgcggatcggtctccggggcagcgtggaacggctgggcccctcggatcgccggagatgctgccctacgcgacggcggcggaggcggaggtggcgcttggccggcccatgacgcccgccgaggcgctgtggttccggtacaccgcgggggtgtccgactaccacctctactgctgcaacatcctcttcctcttcgtcgtcttcacggtggccccgcttcccatcgcgctcctcgagctccgggccccggccgcggtctcgccgtacaaactgcagccgcgggtgcggctctccagggccgagttcgtccggtgctacaaggacgtcctccgcatcttcttcctcgtcatcggcccgctccagctcgtctcctacccggcggtcaagtttgtgggaattcacacgaagttgcctttgccgtcccttgcggagttggcagcacagctactggtgtacttccttgttgaggactacctcaattactggatccacaggtttctccacggggagtgggggtaccagaatatccaccgtgttcaccatgagttcactgcgccaataggattcgcagctccatatgcacactgggctgaggtgctgatactcggcatcccctccttcgtcgggccagccattgttccaggccacatgatcacattctggctctggattatactccgtcaggtggaggctatcgagacacatagcggctttgatttcccatga

SEQ ID NO: 168 - protein, 279 aa, Zea mays
MPVDDFVLVSRLLHSKRTGAGERREQRATHSPPPDFLGVADRSPGQRGTAGPLGSPEMLPYATAAEAEVALGRPMTPAEALWFRYTAGVSDYHLYCCNILFLFVVFTVAPLPIALLELRAPAAVSPYKLQPRVRLSRAEFVRCYKDVLRIFFLVIGPLQLVSYPAVKFVGIHTKLPLPSLAELAAQLLVYFLVEDYLNYWIHRFLHGEWGYQNIHRVHHEFTAPIGFAAPYAHWAEVLILGIPSFVGPAIVPGHMITFWLWIILRQVEAIETHSGFDFP

SEQ ID NO: 169 - DNA, 1242 bp, Zea mays
  CDS (1)..(1242)
atgtttgagccgggtggaggtgtctcgcttcttgatcttgagaggtgttcctggttgattgttgggagcgaagaaggcatgataccttctgtgaggatctctcctggtcctgcagccttctcaggctccagcctacgctcaaaattaccgtcaattccatccatctccagtctcaaaccctccaaatatgtggtctcctcgctgaaaccactctacctagcaccgctagatggtccgcgcactgccgagcttaagtctcggagacagccacttgagttccgttgttctgcttctgctgctgatgacaaggagtcaaagactcaggtggtgccagttcagtcggaaggcgcacagaggttaaagatctccatctatttcgcgacctggtgggcgcttaatgtgatatttaacatttacaacaagaaggttctcaatgctttcccttacccctggctcacctccacactctcccttgcctgtggctctgcgatgatgcttttctcgtgggccactcgtcttgttgaggcccccaagaccgacctagacttctggaaagttcttttcccggttgctgtggcacatacaattggccatgttgctgcgacagtgagcatgtctaaggtggcagtgtcattcacacacataattaaaagtgcagaacctgcattcactgttttggtgtcaaagttcctccttggggagacgtttccagttccagtctatctttctcttcttccaatcattggtggttgtgctctagctgctgtcacagagctgaactttaatatggttggatttatgggtgctatgatatccaaccttgcatttgttttccgcaacatcttctcgaagaggggcatgaaggggaagtccgtcagtggcatgaattactacgcttgcctgtcaattatgtccctggtcatactgactccatttgctatagctatggaaggtcctcagatgtgggctgctggttggcaaaaggctcttgcagaagttggacccaatgttgtctggtggatcgctgcgcagagcgtgttctatcacttatataaccaggtgtcctacatgtctctcgatcagatctctccattgacgtttagcattggcaatacaatgaaacgtatatcagtgattgtttcatctataattatcttccacacgcctgtccgccctgtcaatgcactgggagctgccattgccatccttggcacattcctgtactctcaggcaaaggcgtga

SEQ ID NO: 170 - protein, 413 aa, Zea mays
MFEPGGGVSLLDLERCSWLIVGSEEGMIPSVRISPGPAAFSGSSLRSKLPSIPSISSLKPSKYVVSSLKPLYLAPLDGPRTAELKSRRQPLEFRCSASAADDKESKTQVVPVQSEGAQRLKISIYFATWWALNVIFNIYNKKVLNAFPYPWLTSTLSLACGSAMMLFSWATRLVEAPKTDLDFWKVLFPVAVAHTIGHVAATVSMSKVAVSFTHIIKSAEPAFTVLVSKFLLGETFPVPVYLSLLPIIGGCALAAVTELNFNMVGFMGAMISNLAFVFRNIFSKRGMKGKSVSGMNYYACLSIMSLVILTPFAIAMEGPQMWAAGWQKALAEVGPNVVWWIAAQSVFYHLYNQVSYMSLDQISPLTFSIGNTMKRISVIVSSIIIFHTPVRPVNALGAAIAILGTFLYSQAKA

SEQ ID NO: 171 - DNA, 3300 bp, Zea mays
  CDS (1)..(3300)
atggagagaggtggaggaggagacgaggtggattcagcggccacggcgacgccgaggcggttgtcgccgagggcagcagcgagccccacggaaggcgacgcccggtggggtgacaccagctcgtacggcgctaagaagaagcatagagttttttgtcagcttccgaatggcgattgggcattatgcacacgtcaattacttcctctggtgcatgagtcggttgtaaaggtttctgaagggaaggtactgagattgaaaaccgagtgtctacaacctgcaaatcctgaaattcttgatggagtggatgatcttatgcagctaagttatctaagtgaaccatcagtactgtacaatctgcagtacagatactccaaggatatgatttatactaaagcaggtccagttttggtggctgtcaatcctttcaagaaagtttcactgtatggtaacgagtacatcgatgcatatagaaataaatcaatggatagtccacatgtttatgcaatagcagatgcagcactttgtgaaatgaaaagagatgaagtcaaccaatctataattataagtggtgagagtggagcaggaaaaacagaaaccgcaaaaattgctatgcagtacctggcttcccttggaggtggaagtggcattgaatacgaaattcttcagacaaatccaatactcgaggcttttggcaatgcaaagacattgagaaatgataactcaagtcgttttggaaagcttatagaaattcatttcagtaccactggaagaatatgtggtgctatgattcaaacatttttgcttgagaagtccagagttgtgcaatgtgcagttggtgagcgatcataccatatattttatcagctgtgcgctggtgcacctgcctctctaaaagagaagttgaatttgaaaaaggtggatggatacaaatatcttaagcagagctgttgctattcaattgcgggtgtggatgatgcccaaatgtttcgaactgtgacgcaagctatgaacattgttcatatcagcaaagaggaccaagagagtgtttttgcaatggtctctgctgttctttggctgggggatgtctcgttcacagtaattgacaatgaaaatcatgttgaaatcatagtagatgaagcttcgaaaacggtttcagaacttcttggctgcagtattgaagatctcaatttagctttatctaagcgccacatgaaagttaataatgaaaacattgtccagaaacttacccttgctcaggcaactgatataagagatgctctggccaaatcagtgtatgccagtttgtttgagtggcttgtagaacaaattaataagtctctctcagttggcaagcgtcgaactgggagatctatcagtattcttgatatctatggctttgagtcatttgataagaacagttttgaacagttctgcattaattatgctaatgaaaggttgcagcaacatttcaatcgtcatttgtttaagcttgagcaagaggaatatgtggaggatggcatcgactgggcaaaggttgacttcgaggataatcaagactgtttgagcctctttgagaaaaaaccactgggactattgtctctgctggatgaggaatctactttcccgaatgccacagatcttacttttgcaaacaagcttaagcaacatcttgactcgaattcttgcttcagaggggaaagaggcaaggcatttgctgtccgtcactatgcaggagaggtggcttatgatacttcgggttttctggagaagaatagagatttattgcacatggactcgattcagctccttgccaaatgcaaaacttctctgccaaaaatgtttgcatcgaagatgctagttcaatcagataattctatgtctgttccatatagatctagtgctgctgattctcaaaaactaagtgttgccatgaagttcaagggtcaactgttccaacttatgcaaagactggaaagtacaacgccacactttattcgttgcattaaaccaaacaatttacaacttcctgcaatttatgaacaaggacttgtgcttcaacaacttaaatgttgtggggttcttgaggttgtccggatttcaagatctgggtatccaacaagaatgactcaccagaagtttgctcggcggtatggttttcttcttgaggatgttgcatctcaagatccactcagtgtttcagtcgcaattcttcatcagttcaacattttacctgagatgtatcaagttggctacacaaaattgttcttccgaactggtcagattggcaaccttgaagatactcggaatcgtactctgcatggtattttaagggttcaaagctgtttcagggggcatcaagcccgtcatcatgcaagagaacgaacaagaggagttttggctcttcaatcattcattcgtggtgagaatgcacggcaaatttactcctctttgttgaggaaacatagagcagcagttattttgcagagaaacgtgagatgttggcttgcaagaaggtatttcataaatgtccggaaggcctcagtgataatacagtctggtatccgtggcagtcttgttcgaagatgtaatggcaatattgatctaataaacgtgctaagagagtttgaatcaaaacaggaggcagagggtgaccaaattttgatcaaggcatcagtcctggccgagttacagaggcggatactaaaagccgaggccacagtacgtgaaaaggatgaagagaacgagatgcttcatcagcggcttcagcaatatgaaaaccgctggttagagtacgaacagaaaatgaaagctatggaggaaatgtggcagaagcaaatgcgttcgctgcaatcgagcctttccgtagcaaagaagagccttgttttggatgaaacgcctaggatgtcggactcatcagtggatcagagctgggaaagcaatgggaaccaccatgtcagcagcggttctcagctggtgccacacactggtggacgtgaaatgaacgctggcctcagcgtcatcagccgcttggcagaagaattcgagcagcggagccaggttttcgctgatgacgccaagttcctggtcgaggtcaagtctgggcaggcggacgccagcctaaacccagacatggagctccggaggttgaagcagaacttcgactcgtggaagaaagatttcagtggacggatgagggagacgaaggtgatcctgaacaagctcggcaatggcaacgagtcatcgcccaactctgtgaagcggaagtggtggggcaggctgaacacctccaagttttcgtga

SEQ ID NO: 172 - protein, 1099 aa, Zea mays
MERGGGGDEVDSAATATPRRLSPRAAASPTEGDARWGDTSSYGAKKKHRVFCQLPNGDWALCTRQLLPLVHESVVKVSEGKVLRLKTECLQPANPEILDGVDDLMQLSYLSEPSVLYNLQYRYSKDMIYTKAGPVLVAVNPFKKVSLYGNEYIDAYRNKSMDSPHVYAIADAALCEMKRDEVNQSIIISGESGAGKTETAKIAMQYLASLGGGSGIEYEILQTNPILEAFGNAKTLRNDNSSRFGKLIEIHFSTTGRICGAMIQTFLLEKSRVVQCAVGERSYHIFYQLCAGAPASLKEKLNLKKVDGYKYLKQSCCYSIAGVDDAQMFRTVTQAMNIVHISKEDQESVFAMVSAVLWLGDVSFTVIDNENHVEIIVDEASKTVSELLGCSIEDLNLALSKRHMKVNNENIVQKLTLAQATDIRDALAKSVYASLFEWLVEQINKSLSVGKRRTGRSISILDIYGFESFDKNSFEQFCINYANERLQQHFNRHLFKLEQEEYVEDGIDWAKVDFEDNQDCLSLFEKKPLGLLSLLDEESTFPNATDLTFANKLKQHLDSNSCFRGERGKAFAVRHYAGEVAYDTSGFLEKNRDLLHMDSIQLLAKCKTSLPKMFASKMLVQSDNSMSVPYRSSAADSQKLSVAMKFKGQLFQLMQRLESTTPHFIRCIKPNNLQLPAIYEQGLVLQQLKCCGVLEVVRISRSGYPTRMTHQKFARRYGFLLEDVASQDPLSVSVAILHQFNILPEMYQVGYTKLFFRTGQIGNLEDTRNRTLHGILRVQSCFRGHQARHHARERTRGVLALQSFIRGENARQIYSSLLRKHRAAVILQRNVRCWLARRYFINVRKASVIIQSGIRGSLVRRCNGNIDLINVLREFESKQEAEGDQILIKASVLAELQRRILKAEATVREKDEENEMLHQRLQQYENRWLEYEQKMKAMEEMWQKQMRSLQSSLSVAKKSLVLDETPRMSDSSVDQSWESNGNHHVSSGSQLVPHTGGREMNAGLSVISRLAEEFEQRSQVFADDAKFLVEVKSGQADASLNPDMELRRLKQNFDSWKKDFSGRMRETKVILNKLGNGNESSPNSVKRKWWGRLNTSKFS

SEQ ID NO: 173 - DNA, 3303 bp, Zea mays
  CDS (1)..(3303)
atggagagaggtggaggaggagacgaggtggattcagcggccacggcgacgccgaggcggttgtcgccgagggcagcagcgagccccacggaaggcgacgcccggtggggtgacaccagctcgtacggcgctaagaagaagcatagagttttttgtcagcttccgaatggcgattgggcattatgcacacgtcaattacttcctctggtgcatgagtcggttgtaaaggtttctgaagggaaggtactgagattgaaaaccgagtgtctacaacctgcaaatcctgaaattcttgatggagtggatgatcttatgcagctaagttatctaagtgaaccatcagtactgtacaatctgcagtacagatactccaaggatatgatttatactaaagcaggtccagttttggtggctgtcaatcctttcaagaaagtttcactgtatggtaacgagtacatcgatgcatatagaaataaatcaatggatagtccacatgtttatgcaatagcagatgcagcactttgtgaaatgaaaagagatgaagtcaaccaatctataattataagtggtgagagtggagcaggaaaaacagaaaccgcaaaaattgctatgcagtacctggcttcccttggaggtggaagtggcattgaatacgaaattcttcagacaaatccaatactcgaggcttttggcaatgcaaagacattgagaaatgataactcaagtcgttttggaaagcttatagaaattcatttcagtaccactggaagaatatgtggtgccatgattcaaacatttttgcttgagaagtccagagttgtgcaatgtgcagttggtgagcgatcataccatatattttatcagctgtgcgctggtgcacctgcctctctaaaagagaagttgaatttgaaaaaggtggatggatacaaatatcttaagcagagctgttgctattcaattgcgggtgtggatgatgcccaaatgtttcgaactgtgacgcaagctatgaacattgttcatatcagcaaagaggaccaagagagtgtttttgcaatggtctctgctgttctttggctgggggatgtctcgttcacagtaattgacaatgaaaatcatgttgaaatcatagtagatgaagcttcgaaaacggtttcagaacttcttggctgcagtattgaagatctcaatttagctttatcaaagcgccacatgaaagttaataatgaaaacattgtccagaaacttacccttgctcaggcaactgatataagagatgctctggccaaatcagtgtatgccagtttgtttgagtggcttgtagaacaaattaataagtctctctcagttggcaagcgtcgaactgggagatctatcagtattcttgatatctatggctttgaatcatttgataagaacagttttgaacagttctgcattaattatgctaatgaaaggttgcagcaacatttcaatcgtcatttgtttaagcttgagcaagaggaatatgtggaggatggcatcgactgggcaaaggttgacttcgaggataatcaggactgtttgagcctctttgagaaaaaaccactgggactattgtctctgctggatgaggaatctactttcccgaatgccacagatcttacttttgcaaacaagcttaagcaacatcttgactcgaattcttgcttcagaggagaaagaggcaaggcatttgctgtccgtcactatgcaggagaggtggcttatgatacttcgggttttctggagaagaatagagatttattgcacatggactcgattcagctccttgccaaatgcaaaacttctctgccaaaaatgtttgcatcgaagatgctagttcaatcagataattctatgtctgttccatatagatctagtgctgctgattctcaaaaactaagtgttgccatgaagttcaagggtcaactgttccaacttatgcaaagactggaaagtacaacgccacactttattcgttgcattaaaccaaacaatttacaacttcctgcaatttatgaacaaggacttgtgcttcaacaacttaaatgttgtggggttcttgaggttgtccggatttcaagatctgggtatccaacaagaatgactcaccagaagtttgctcggcggtctggttttcttcttgttgaggatgttgcatctcaagatccactcagtgtttcagttgcaattcttcatcagttcaacattttacctgagatgtatcaagttggctacacaaagttgttcttccgaactggtcagattggcaaccttgaagatactcggaatcgtactctgcatggtattttaagggttcaaagctgtttcagggggcatcaagcccgtcatcatgcaagagaacgaacaagaggagttttgactcttcaatcattcattcgtggtgagaatgcacggcaaatttactcctctttgttgaggaaacatagagccgcagttgttttgcagagaaatgtgagatgttggcttgcaagaaggtatttcataaatgtccggaaggcctcagtgataatacagtctggtattcgtggcagtcttgttcgaagatgtaatggcaatattgatctaataaatgtgctaagagagtttgaatcaaaacaggaggcacatggtgaccaaattttgatcaaggcctcagtcctggctgagttacagaggcggatactaaaagccgaggccacagtacgtgaaaaggatgaagagaacgagatgcttcatcagcggcttcagcaatatgaaaaccgctggttagagtacgaacagaaaatgaaagctatggaggaaatgtggcagaagcaaatgcgttcgctgcaatcgagcctttccgtagcaaagaagagccttgttttggatgaaacgcctaggatgtcggactcatcagtggatcagagctgggaaagcaatgggaaccaccatgtcagcagcggttctcagctggtgccacacactggtggacgtgaaatgaacgctggcctcagcgtcatcagccgcctggcagaagaattcgagcagcggacgcaggttttcgctgatgacgccaagttcctggtcgaggtcaagtctgggcaggcggacgccagcctaaacccagacatggagctccggaggttgaagcagaacttcgactcgtggaagaaagatttcagtggacggatgagggagacgaaggtgatcctgaacaagctcggcaatggcaacgagtcatcgcccaactctgtgaagcggaagtggtggggcaggctgaacacctccaagttttcgtga

SEQ ID NO: 174 - protein, 1100 aa, Zea mays
MERGGGGDEVDSAATATPRRLSPRAAASPTEGDARWGDTSSYGAKKKHRVFCQLPNGDWALCTRQLLPLVHESVVKVSEGKVLRLKTECLQPANPEILDGVDDLMQLSYLSEPSVLYNLQYRYSKDMIYTKAGPVLVAVNPFKKVSLYGNEYIDAYRNKSMDSPHVYAIADAALCEMKRDEVNQSIIISGESGAGKTETAKIAMQYLASLGGGSGIEYEILQTNPILEAFGNAKTLRNDNSSRFGKLIEIHFSTTGRICGAMIQTFLLEKSRVVQCAVGERSYHIFYQLCAGAPASLKEKLNLKKVDGYKYLKQSCCYSIAGVDDAQMFRTVTQAMNIVHISKEDQESVFAMVSAVLWLGDVSFTVIDNENHVEIIVDEASKTVSELLGCSIEDLNLALSKRHMKVNNENIVQKLTLAQATDIRDALAKSVYASLFEWLVEQINKSLSVGKRRTGRSISILDIYGFESFDKNSFEQFCINYANERLQQHFNRHLFKLEQEEYVEDGIDWAKVDFEDNQDCLSLFEKKPLGLLSLLDEESTFPNATDLTFANKLKQHLDSNSCFRGERGKAFAVRHYAGEVAYDTSGFLEKNRDLLHMDSIQLLAKCKTSLPKMFASKMLVQSDNSMSVPYRSSAADSQKLSVAMKFKGQLFQLMQRLESTTPHFIRCIKPNNLQLPAIYEQGLVLQQLKCCGVLEVVRISRSGYPTRMTHQKFARRSGFLLVEDVASQDPLSVSVAILHQFNILPEMYQVGYTKLFFRTGQIGNLEDTRNRTLHGILRVQSCFRGHQARHHARERTRGVLTLQSFIRGENARQIYSSLLRKHRAAVVLQRNVRCWLARRYFINVRKASVIIQSGIRGSLVRRCNGNIDLINVLREFESKQEAHGDQILIKASVLAELQRRILKAEATVREKDEENEMLHQRLQQYENRWLEYEQKMKAMEEMWQKQMRSLQSSLSVAKKSLVLDETPRMSDSSVDQSWESNGNHHVSSGSQLVPHTGGREMNAGLSVISRLAEEFEQRTQVFADDAKFLVEVKSGQADASLNPDMELRRLKQNFDSWKKDFSGRMRETKVILNKLGNGNESSPNSVKRKWWGRLNTSKFS

SEQ ID NO: 175 - DNA, 885 bp, Zea mays
  CDS (1)..(885)
  misc_feature (30)..(30): n at position 30 is a or g or c or t/u
atgtcgctgtcgacgatttcgtcttcatcngtggccgccgcggcgagcacattcctgggcacccgcctggcggacccggcgccacagaacgggcgcatcgtggcccggttcgggttcgggttgggcggcaaggcgaagcctgctccgaagaaggtggcgaagacatcgacctcctctgaccggccgctgtggttccccggcgccgtggcgcccgactacctggacggctcgctggtcggcgactacgggttcgacccgttcggtctcgggaagcccgtggagtacctgcagttcgagttggactcgctggaccagaacctggccaagaatgaggccggcggcatcatcggcacccggttcgagtcctccgaagtcaagtccaccccgttgcagccctacagcgaggtgttcggcctccagcggttccgcgagtgcgagctcatccacggccgctgggccatgctcgccaccctcggcgccctctccgtcgagtggctcaccggcgtcacctggcaggacgccggcaaggtggagctggtggacgggtcctcctacctgggccagccgctgccgttctccatctcgacgctcatctggatcgaggtgctcgtgatcggctacatcgagttccagcgcaacgccgagctcgacccggagaagaggctgtaccccggcggctcctacttcgacccgctcggcctggcggccgaccctgagaagaaggagcggctgcagctggcggagatcaagcacgcgcgcctcgccatggtcgccttcctcggcttcgccgtgcaggccgccgccaccggcaaggggccgctcaacaactgggccacccacctgagcgacccgctccacactaccatcttcgacacgttcgggtga

SEQ ID NO: 176 - protein, 294 aa, Zea mays
MSLSTISSSSVAAAASTFLGTRLADPAPQNGRIVARFGFGLGGKAKPAPKKVAKTSTSSDRPLWFPGAVAPDYLDGSLVGDYGFDPFGLGKPVEYLQFELDSLDQNLAKNEAGGIIGTRFESSEVKSTPLQPYSEVFGLQRFRECELIHGRWAMLATLGALSVEWLTGVTWQDAGKVELVDGSSYLGQPLPFSISTLIWIEVLVIGYIEFQRNAELDPEKRLYPGGSYFDPLGLAADPEKKERLQLAEIKHARLAMVAFLGFAVQAAATGKGPLNNWATHLSDPLHTTIFDTFG

SEQ ID NO: 177 - DNA, 642 bp, Zea mays
  CDS (1)..(642)
  misc_feature (70)..(70): n at position 70 is a or g or c or t/u
atgtccgccgcgatcctcccgactagccgcggctgcctcccctccagcggccaggcagaggatggagggngcaggcaaggatggcaacccgttgaggaattatcggattggcaagactctcggaattggctcattcgggaaggtgaaaattgcggagatatcagcactggacacaaggtggcaatcaagattctcaaccgccgtaaaatcagaggcatggagatggaagagaaagttaaaagagagattaagatattgaggttatttatgcatccacatattatccgcctctatgaggttatagacacaccggctgatatttatgttgttatggagtatgttaagtgtggggaattatttgattacattgttgagaaaggtaggctgcaggaggaagaggctcgccgtttcttccaacagattatatccggtgttgaatattgccatagaaacatggtggtgcatcgtgatctaaagccagaaaacctcctattggattcaaaatgcaatgttaagattgcagattttggcttaagtaatgttatgcgggatggtcattttctgaagacaagttgtggtagcccaaattatgctgctcctgaggtgatatctggtaaactatatgctggacctgaagtttga

SEQ ID NO: 178 - protein, 213 aa, Zea mays
  misc_feature (24)..(24): Xaa can be Ser or Arg or Gly or Cys
MSAAILPTSRGCLPSSGQAEDGGXRQGWQPVEELSDWQDSRNWLIREGENCGDISTGHKVAIKILNRRKIRGMEMEEKVKREIKILRLFMHPHIIRLYEVIDTPADIYVVMEYVKCGELFDYIVEKGRLQEEEARRFFQQIISGVEYCHRNMVVHRDLKPENLLLDSKCNVKIADFGLSNVMRDGHFLKTSCGSPNYAAPEVISGKLYAGPEV

SEQ ID NO: 179 - DNA, 450 bp, Zea mays
  CDS (1)..(450)
  misc_feature (402)..(447): n at positions 402 and 447 is a or g or c or t/u
atgaggggccgggtggagctgaagcggatcgagaacaagatcaaccgccaggtcaccttcgccaagcgccgcaacggcctgctcaagaaggcgtacgagctctccgtgctctgcgacgccgaagtcgcgctcatcgtcttctccaaccgcggcaagctatacgagttctgtagcggaccgagcatcacgagaacacttgagaggtacgaaaaaaacagttatgcaggcccagatactgctgtacagaacaaagagaacgagttagtccagaacagccgcaatgagtaccttaaactgaaagcaaaggtggataatttacagaggactcagaggaatttgcttggtgaagatctgggttcacttggtgtcaaagagcttgatcagcttgagaagcaaattganttcatccttaagtcacataagatccacaaggacacagcatatgcntga

SEQ ID NO: 180 - protein, 149 aa, Zea mays
  misc_feature (134)..(134): Xaa can be Asp or Glu
MRGRVELKRIENKINRQVTFAKRRNGLLKKAYELSVLCDAEVALIVFSNRGKLYEFCSGPSITRTLERYEKNSYAGPDTAVQNKENELVQNSRNEYLKLKAKVDNLQRTQRNLLGEDLGSLGVKELDQLEKQIXFILKSHKIHKDTAYA

SEQ ID NO: 181 - DNA, 822 bp, Zea mays
  CDS (1)..(822)
atgactctctccctcctaccacacacagcctccggactgctccggacgcgcgcctcagatctactccaacacctccgcagcggcggcgcccgcgggtggaggagcaggagaggcggcgccatggtcgggaccgggaagagggagcggatagcgatacggaggatcgacaacctggcggccaggcaggtgaccttctccaagaggcggcggggcctgttcaagaaggccgaggagctctccatcctctgcgacgccgaggtcggccttgtcgtcttctccgccaccggcaaactcttccacttcgccagctccagcatgaagcaggtaatcgatcggtacgactctcattccaagactctccagaggtccgaaccgcagtcgtctcaactgcagtcacatatggatgacggcacttgtgcaaggctaaaggaggaacttgctgaaacaagccttaagctcaggcagatgagaggagaggagctccagaggctgagcgtcgaacagctgcaggagctcgagaagaccctcgaatccggcctcggctctgtactcaaaaccaagagccaaaaaatccttgacgagatcagcggtctggaaagaaagagaacgcagctgatcgaggagaactcaaggctgaaggagcaagtgacacggatgtcgaggatggagacgcagcttggcgccgatccagagttcgtgtacgaggaagggcagtcgtctgaatccgtgacgaacacgtcctatccgcgcccgtccaccgacaccgacgactgctccgacacatcgctcaggctcgggctaccactcttcagctccaagtga

SEQ ID NO: 182 - protein, 273 aa, Zea mays
MTLSLLPHTASGLLRTRASDLLQHLRSGGARGWRSRRGGAMVGTGKRERIAIRRIDNLAARQVTFSKRRRGLFKKAEELSILCDAEVGLVVFSATGKLFHFASSSMKQVIDRYDSHSKTLQRSEPQSSQLQSHMDDGTCARLKEELAETSLKLRQMRGEELQRLSVEQLQELEKTLESGLGSVLKTKSQKILDEISGLERKRTQLIEENSRLKEQVTRMSRMETQLGADPEFVYEEGQSSESVTNTSYPRPSTDTDDCSDTSLRLGLPLFSSK

SEQ ID NO: 183 - DNA, 843 bp, Zea mays
  CDS (1)..(843)
  misc_feature (19)..(80): n at positions 19 and 80 is a or g or c or t/u
atggccatcgacacgatcngcgagcgcaagcacgtacgttgtcggaagctcaagttagaagaagcaccagtgcctgatcngatggcggcccaggctctcctctccggccggcagctgctgggccgccccgtgcagtcggccgtctctaggtcgtcggcgaggaaggcgcccttcgtcgtcagggccagctccagccctccagccaagcaaggtgccgacaggcagctgtggttcgcgtccaagcagtccctctcctacctcgatggcacgctgcccggcgactatggcttcgacccgctgggcctctcggacccggagggcaccgggggcttcatcgagcccaagtggctggcctatggcgaggtgatcaacggccgctacgccatgctgggcgcggtgggcgccatcgccccggagatcttcggcaagatgggcatcatccccccggagaccgcgctgccgtggttcaagacgggcgtcatcccgcccgcgggcacctacaactactgggccgactcctacacgctcttcgtcttcaacatggcgctcatgggcttcgccgagcaccgccgcctccaggactggtacaacccgggctccatgggcaagcagtacttcctcggcctcgagaagttcctcgccggctccggcgacccgtcctaccccggcgggcccctcttcaacccgctcggcttcggcaagaccgagaaggagatgaatgagctcaagctcaaggagatcaagaacggcaggctcgccatgctcgccatcctcggttacttcatccaggggctcgtcaccggcgtcggcccgttccagaacctgctcgaccacctcgcctga

SEQ ID NO: 184 - protein, 280 aa, Zea mays
  misc_feature (7)..(7): Xaa can be Ser or Arg or Gly or Cys
  misc_feature (27)..(27): Xaa can be Arg or Gln or Leu or Pro
MAIDTIXERKHVRCRKLKLEEAPVPDXMAAQALLSGRQLLGRPVQSAVSRSSARKAPFVVRASSSPPAKQGADRQLWFASKQSLSYLDGTLPGDYGFDPLGLSDPEGTGGFIEPKWLAYGEVINGRYAMLGAVGAIAPEIFGKMGIIPPETALPWFKTGVIPPAGTYNYWADSYTLFVFNMALMGFAEHRRLQDWYNPGSMGKQYFLGLEKFLAGSGDPSYPGGPLFNPLGFGKTEKEMNELKLKEIKNGRLAMLAILGYFIQGLVTGVGPFQNLLDHLA

SEQ ID NO: 185 - DNA, 519 bp, Zea mays
  CDS (1)..(519)
atggcacgcctgctcctctccgtctcagtccccatgtccgctagcagcagccgccgcattgtggttcctggtaccgcgcggcaccgaggccgcagcggcgtctgtgtcgctgtgcccgccacctccaccgccaccgccacccaacaagaatttgaccccgcggcggcgccaccgttcgggctgggcgacatccgcgccgccatccccaagcactgctgggtgaaggacccctggcgctccatgggctacgtggtgcgcgacgtggtcctggtgctgggtctcgccgccgccgcggcgcgcctcgacagctggctcgtctggccgctctactgggcggcacagggcaccatgttctgggcgctcttcgtgctgggacacgactgcggccacggcagcttctccaacaaccccagactcaacagcgtggtcggtcacattctgcactcctccatcctggtgccatacaacggctggcggattagccacaggacgcaccaccagaaccacgggcacgtgtga

SEQ ID NO: 186 - protein, 172 aa, Zea mays
MARLLLSVSVPMSASSSRRIVVPGTARHRGRSGVCVAVPATSTATATQQEFDPAAAPPFGLGDIRAAIPKHCWVKDPWRSMGYVVRDVVLVLGLAAAAARLDSWLVWPLYWAAQGTMFWALFVLGHDCGHGSFSNNPRLNSVVGHILHSSILVPYNGWRISHRTHHQNHGHV

SEQ ID NO: 187 - DNA, 570 bp, Zea mays
  CDS (1)..(570)
  misc_feature (522)..(567): n at positions 522 and 567 is a or g or c or t/u
atgttgcatcgggccggtcgagtcggagaggaaaagctagctagcagctaccagctctcggccggcggtggtagtctgcctgcagctggggttagctgcaagggttgggagctagccatggggaggggtcgggtggagctgaagcggatcgagaacaagatcaaccgccaggtcaccttcgccaagcgccgcaacggcctgctcaagaaggcgtacgagctctccgtgctctgcgacgccgaagtcgcgctcatcatcttctccaaccgcggcaagctctacgagttctgcagcggacagagcattaccaaaacacttgagaggtatgaaaaaaacagttatggaggaccagatactgctgtacagaacaaggagaacgagttagtccagagcagtcgtaatgagtacctcaagctgaaagcgagggtggataatttacagaggactcagaggaatttgcttggtgaagatctggggtcacttggtgtcaaagagcttgagcagcttgagaagcaacttganttcatccttaaggcacataagatccacaaggacacaacatatgcntga

SEQ ID NO: 188 - protein, 189 aa, Zea mays
  misc_feature (174)..(174): Xaa can be Asp or Glu
MLHRAGRVGEEKLASSYQLSAGGGSLPAAGVSCKGWELAMGRGRVELKRIENKINRQVTFAKRRNGLLKKAYELSVLCDAEVALIIFSNRGKLYEFCSGQSITKTLERYEKNSYGGPDTAVQNKENELVQSSRNEYLKLKARVDNLQRTQRNLLGEDLGSLGVKELEQLEKQLXFILKAHKIHKDTTYA

SEQ ID NO: 189 - DNA, 1620 bp, Zea mays
  CDS (1)..(1620)
  misc_feature (96)..(96): n at position 96 is a or g or c or t/u
atgggcctgcctccgctgccggccgtgctacctaatcgccgcgcttgttttcccaccgcccgatggccgccatcacgccgccgacgcagtcggagnccgtcgccgcagacggggcgcccggcctcgtctgccgccgccgcggccaagcgtggagggggcggggctggtgccgccggcgggccgctgatggggaagtacgagctggggcgcctcctggggcacggcaccttcgcgaaggtgtaccacgcgcggcacgtcgacacgggggacaacgttgccatcaaggtgctcgacaaggagaaggccgtgaagagcgggctcgtcccgcacatcaagcgcgagatcgctgtgctacgccgcgtgcgccacccgaacatcgtgcacctgttcgaggttatggccacgaagactaagatctacttcgtcatggagctcgtccgcggcggcgagctcttctcccgcgtctccaagggccgactcagggaggacaccgcgcgccgctacttccagcagctcgtctccgccgtggggttctgccacgcccgcggcgtcttccaccgcgacctgaagcccgagaatctactcgtcgacgagcaggggaacctcaaggtatcggattttgggctctccgccgtcgccgagcagttccgtcccgacggcctgctccacaccttctgcggcacgccggcctatgtggcccccgaagtgctcggccgccgcgggtacgacggcgccaaggcagacgtgtggtcgtgcggtgtcatcctctttgtgctcatggccggatatctccctttccatgacaaaaacatcatggccatgtacaagaagatttacaagggcgagttccgctgtgcgaggtggttctccaaagaccttaccagcttgctgatgcgcattcttcacactaatcccaacactcggatcactttgccggagatcatggagtcccgctggttcaagaaaggattcaagcctgtcaagttctatatcgaggatgaccagctgcataacgttatagatgacgaagatggcctgttagatatgggacctgctggtcctgttcctccaccattgccacctccaccgccacctctatctccaccaaaggttgatggtgatgaatcagggtcggactcagactcgtcgatctcatcctgccctgcttcaatgttatctgatgagagccaaaggccccgtggctctctaccacgtccagcaagtcttaatgcctttgatatcatatcattttcaaggggatttaacttatcagggttatttgaggagaaaggggatgaagtgaggttcatctcggctgagcccatgtcagatatcataaccaaattggaggacatagcgaagctgaagagcttcaagttgcggaggaaggactggcgcatctgcctggagggtacaagggaaggagttaaggggccattaacaattggcgcggagatatttgaactcacacctccccttgtaatggtggaggtaaaaaagaaggcaggggataatgaagagtacgagaacttctgtgacaaggaattgaagccagggatgcagcaccttgtccaccatatggtccgagctccaagtatgctgcttactgatgccaagtga

SEQ ID NO: 190 - protein, 539 aa, Zea mays
  misc_feature (32)..(32): Xaa can be Arg or Ser
MGLPPLPAVLPNRRACFPTARWPPSRRRRSRXPSPQTGRPASSAAAAAKRGGGGAGAAGGPLMGKYELGRLLGHGTFAKVYHARHVDTGDNVAIKVLDKEKAVKSGLVPHIKREIAVLRRVRHPNIVHLFEVMATKTKIYFVMELVRGGELFSRVSKGRLREDTARRYFQQLVSAVGFCHARGVFHRDLKPENLLVDEQGNLKVSDFGLSAVAEQFRPDGLLHTFCGTPAYVAPEVLGRRGYDGAKADVWSCGVILFVLMAGYLPFHDKNIMAMYKKIYKGEFRCARWFSKDLTSLLMRILHTNPNTRITLPEIMESRWFKKGFKPVKFYIEDDQLHNVIDDEDGLLDMGPAGPVPPPLPPPPPPLSPPKVDGDESGSDSDSSISSCPASMLSDESQRPRGSLPRPASLNAFDIISFSRGFNLSGLFEEKGDEVRFISAEPMSDIITKLEDIAKLKSFKLRRKDWRICLEGTREGVKGPLTIGAEIFELTPPLVMVEVKKKAGDNEEYENFCDKELKPGMQHLVHHMVRAPSMLLTDAK

SEQ ID NO: 191 - DNA, 795 bp, Zea mays
  CDS (1)..(795)
  misc_feature (583)..(625): n at positions 583 and 625 is a or g or c or t/u
atgtgcgaacttggtggcgtagacccaggcgttgttggcgacggggtcgtcgaggtggtcgagcaggttctcgaggggccccttgccggtgacgatggcctggacgaagaagccgaacatggagaacatggcgaggcggccgttcttgatctccttgaccttgagctcggtgaaggtgacggggtcgtcggcgaggcccagcgggtcgaagtactggccgccggggtagaggttgttgccctcgccgacgccgtcgaggccgttgatgcggaagccctcgacgaggcccatgaggatgacctggaagccgagcacggcgaggatgctctgcgcgtgcaccaggttggggttgcccaggtagtccagcccgccctccgagaagatctgcgcgccggccttgaaccacacgggctccttgaagtccacgcgcacccacttctccagcacctccggggtgatgcagcccagcgcccccagcatcgcccaccgcccgtggatcacctccagcgccctgttccgcgcgaacgcctccgggtccgcggacagcccggcggtgtcccagccgtagtcgccggggaactcngccggtcaggtacgagggcgtctgggcggagaaggggcctcnggtacttgattgcggtccgaggccgataccacaggtcgttgcccatggtgatccggccgccagcagcggcggcggcgacgtcgcggagggggctggcattggcggcggcgcgaccctggccaagaaacggcgtctttgccgcgacgatgcgggaggtggcggccatgtga

SEQ ID NO: 192 - protein, 264 aa, Zea mays
  misc_feature (195)..(195): Xaa can be Ser or Arg or Gly or Cys
  misc_feature (209)..(209): Xaa can be Arg or Gly or Trp
MCELGGVDPGVVGDGVVEVVEQVLEGPLAGDDGLDEEAEHGEHGEAAVLDLLDLELGEGDGVVGEAQRVEVLAAGVEVVALADAVEAVDAEALDEAHEDDLEAEHGEDALRVHQVGVAQVVQPALREDLRAGLEPHGLLEVHAHPLLQHLRGDAAQRPQHRPPPVDHLQRPVPRERLRVRGQPGGVPAVVAGELXRSGTRASGRRRGLXYLIAVRGRYHRSLPMVIRPPAAAAATSRRGLALAAARPWPRNGVFAATMREVAAM

SEQ ID NO: 193 - DNA, 1080 bp, Zea mays
  CDS (1)..(1080)
atgccacctgcttcttctcataaacgcttccggcctcccggagacccggacacaaaccctagcattcaaccacgccgagctcgccggaacaagcccaacccgagcccaatcccgctcgggccccacccgatccggcggctcctcaccagtacaatccggggtaccccgcggatgctattctgtatcgggtccccacggtcgatgggttcgcccgggtccgccaatggcagacgcggcgactatgtgaggatcccggaggaggcggaggtggcgtccaagggggagggagatgccgcggcggccgtcaaggcggccgcggcggcgcagtgccctagggtgctgcggtgcagcgcgatccggtggtgggccaaggtcgccgtgctcgggatcttccttgctggggccggagctgccgcggtcgtcttcctcggcccgctccttatcaagaagattgttgtacctattcttcactgggaatcaacaacattcagcagaccatctattgctctaatatgtttcggcacaatcgcattattcccaagtgttttgttaccttcttcgcccttcatgtggcttgcggggatgacttttggatatctttatggttttttaataatcacagtgggtatgagcataggcatgtcattgccgtattttataggttctgcattccactgtaggatacatagatggttggagaagtggccaaagaaagcagcttttgtaaggcttgctggcgagggagattggcatcatcaatttaaggctgtagctttactcaggatttctccatttccatatttagtttttaactacgcttctgtggctacgaacgtcaaatattacccatacatagctggttccatggctggaaccatacatgaaactttccttgcaatatacagtgggaaacttctacagagcttggctgtagcaactagccaagggtcattcttgtcggtggatcagattatctacaatggaatcggctttacaattgctgcaacttccactgctgctatcactatttatgcaaagaaagcgcttcaaaagctccaagcggaggacgagatattttga

SEQ ID NO: 194 - protein, 359 aa, Zea mays
MPPASSHKRFRPPGDPDTNPSIQPRRARRNKPNPSPIPLGPHPIRRLLTSTIRGTPRMLFCIGSPRSMGSPGSANGRRGDYVRIPEEAEVASKGEGDAAAAVKAAAAAQCPRVLRCSAIRWWAKVAVLGIFLAGAGAAAVVFLGPLLIKKIVVPILHWESTTFSRPSIALICFGTIALFPSVLLPSSPFMWLAGMTFGYLYGFLIITVGMSIGMSLPYFIGSAFHCRIHRWLEKWPKKAAFVRLAGEGDWHHQFKAVALLRISPFPYLVFNYASVATNVKYYPYIAGSMAGTIHETFLAIYSGKLLQSLAVATSQGSFLSVDQIIYNGIGFTIAATSTAAITIYAKKALQKLQAEDEIF

SEQ ID NO: 195 - DNA, 1077 bp, Zea mays
  CDS (1)..(1077)
atgattaattatctgacggtgcatgtcatgcccatgacacccctcgagtgcgacatggcccctgcagcttctcgcaacaaacacctctcgcggtcgtggcctctccctcgctgcggcctgctggtcttggtccttgcactggcggcgaccgccgcggtgggcagcgcgcagctgtcgtcggaggactactacgacgcgtcctgccccgccgcccttctcaccatcaggaccgccgtctcgacggccgtgctgctggagccccgcatgggggcctcccttctccgcctccacttccacgactgtttcgtgcagggttgcgacgcgtcggtgctgctagacgacacggcgagcttcaccggcgagaagggggcggggccgaacgcggggtcgctccggggcttcgacgtgatcgacaacatcaagatgctgctggagctgctgtgcccgcagaccgtctcctgcgccgacatcctcgccatcgccgcccgcgactccgttgcacaactgggaggaccatcgtgggcggttccgctgggcaggagggacgcgaccacggcgagcgcgtccctggccaacagtgacctccctgggcctaccagcagcctcaacggcctgctcaacgctttctccaacaagggtttgagcagcaccgacatggttgccctctcaggtgcccacaccgtcggccgggcgcagtgcaagaactgccgggcccggatctacaacgacaccgacatcgacgcctccttcgcggcgtcgctgcgggccagctgccccgcgcaggccggcgccggcgacggcgcgctcgagccgctcgacggctccacgccggacgccttcgacaacgcctacttcggggacctgctttcccagcgcggcctgctccactccgaccaggcgcttttcggcggcggcggcggcggcggcggcgcgacggacggcctggtcagcgcctacgcgtccaacgccggccagtggggggccgacttcgcggcggccatggtcaagatgggcagcatcagcccgctcaccggcacggacggggagatcagggtcaactgccggagagtgaattga

SEQ ID NO: 196 - protein, 358 aa, Zea mays
MINYLTVHVMPMTPLECDMAPAASRNKHLSRSWPLPRCGLLVLVLALAATAAVGSAQLSSEDYYDASCPAALLTIRTAVSTAVLLEPRMGASLLRLHFHDCFVQGCDASVLLDDTASFTGEKGAGPNAGSLRGFDVIDNIKMLLELLCPQTVSCADILAIAARDSVAQLGGPSWAVPLGRRDATTASASLANSDLPGPTSSLNGLLNAFSNKGLSSTDMVALSGAHTVGRAQCKNCRARIYNDTDIDASFAASLRASCPAQAGAGDGALEPLDGSTPDAFDNAYFGDLLSQRGLLHSDQALFGGGGGGGGATDGLVSAYASNAGQWGADFAAAMVKMGSISPLTGTDGEIRVNCRRVN

SEQ ID NO: 197 - DNA, 1485 bp, Zea mays
  CDS (1)..(1485)
atgtcaccaccactcttggcgagcgaaatccaccgtacaccgctgcctccctctccctgtctcgtctcgtcgaaccagccgaggaagccaacgcagacccagcgatcctcgtcgcgcgccctcctcccccacggagggaaggatggcggacgcaaagcggcggcggcggcgaggaagacgcgggtgggcccgtacgaggtcggcaagaccatcggcgagggcagcttcgccaaggtcaagcacgcgcgcgactcccgcaccggcgccgtccgcgccatcaaggtgctcgaccgcaaccacgtcctccgccacaggatggtcgagcagatcaagcgggagatttcgactatgaagctgatcaaacatcccaatgtggtccagctgcatgaggttatggcgagcagaacgaagatatacatggttcttgaatttgttgatggaggcgagctattcgataagatcgtcaattctggaaggctaggagaggatgaagctaggatatactttcatcaacttataaatgcggttgattattgtcatagccgaggagtgtaccatagagatctgaagccagagaatctacttctggactcacatggaacccttaaagtttcagactttggcctaagtgcatttgcaccacaaacaaaagaggatgggcttctgcatactgcctgtggaactccaaactatgtagcgcctgaggtgctcgctgataaaggctatgatggtatggctgcagatgtatggtcctgtggcataatcttgtttgttcttatggccggatacttaccctttgatgatgtcaatctgatgagactgtacaaactgatctgccatgcaactttttcttgcccaccatggttttcttctggagcaaggaagtttattaagcgcattctcgatcctaaccctgatactaggataaaaattgcagaaatgttggaagatgaatggttcaaaaaaggctataaaccaccacattttgaacaaggcgaagatgttaaccttgacgacattgatgctgcattcaatgattcagaggaccgtcttgtggcagagaaaagagagaagccagaatccatgaacgcatttgctcttatttcgaggtcgcagggtttcaaccttggaaatttgtttgagaaggagatgatgggaatggtaaagagggaaacatctttcacgtctcaatgtacagcacaggagatcatgtcaaaaatagaggatgcatgtgggccactcggtttcaacgtgcggaaacaaaattacaagatgaaattgaaaggtgacaaatctggaagaaaaggtcacttatctgttgcaactgaggtttttgaggttgccccatcacttcacatggttgagcttcgtaaaaccggaggagacacattggagttccacagcttctacaagaacttctcatcggagctgaaagatatcgtgtggaaagctgaatctgatgcaaataataaacagacgaagtga

SEQ ID NO: 198 - protein, 494 aa, Zea mays
MSPPLLASEIHRTPLPPSPCLVSSNQPRKPTQTQRSSSRALLPHGGKDGGRKAAAAARKTRVGPYEVGKTIGEGSFAKVKHARDSRTGAVRAIKVLDRNHVLRHRMVEQIKREISTMKLIKHPNVVQLHEVMASRTKIYMVLEFVDGGELFDKIVNSGRLGEDEARIYFHQLINAVDYCHSRGVYHRDLKPENLLLDSHGTLKVSDFGLSAFAPQTKEDGLLHTACGTPNYVAPEVLADKGYDGMAADVWSCGIILFVLMAGYLPFDDVNLMRLYKLICHATFSCPPWFSSGARKFIKRILDPNPDTRIKIAEMLEDEWFKKGYKPPHFEQGEDVNLDDIDAAFNDSEDRLVAEKREKPESMNAFALISRSQGFNLGNLFEKEMMGMVKRETSFTSQCTAQEIMSKIEDACGPLGFNVRKQNYKMKLKGDKSGRKGHLSVATEVFEVAPSLHMVELRKTGGDTLEFHSFYKNFSSELKDIVWKAESDANNKQTK

SEQ ID NO: 199 - DNA, 1041 bp, Zea mays
  CDS (1)..(1041)
atgcggcgaggccaagggcgcgggcgcgggcgcggtacggcaatggcgagagctggaggcggcggtccggtccgcggcgcggcgctggtggtcgtgctgctaggcatcgtcgtgggcgcggcgagggctcagctgcggcagaactactacggcagctcgtgccccagcgcggagtccacggtgcgctccgtcatctcgcagcgcctccagcagagcttcgccgtggggcccggcacgctccgcctcttcttccacgactgcttcgtcaggggatgcgacgcgtcggtgatgctgatggcgccgaacggggacgacgagagccacagcggcgcggacgccacgctgtcgccggacgccgtggacgccatcaacaaggcgaaggcggccgtggaggcgctccccgggtgcgccggcaaggtctcgtgcgcggacatcctcgccatggccgcacgtgacgtcgtctccctgctgggcgggccgagctacggcgtggagctggggcggctggacggcaagacgttcaacagggccatcgtgaagcacgtcctcccgggccccggcttcaacctggaccagctcaacgccctcttcgcgcagaacggcctcacgcagacggacatgatcgcgctctcaggcgcgcacacgatcggggtgacgcactgcgacaagttcgtgcggcggatctacacgttcaagcagcggctggcgtggaacccgccgatgaacctggacttcctgcgctcgctgcggcgggtgtgccccctcagctacagccccacggcgttcgccatgctggacgtcaccacgcccagggtcttcgacaacgcctacttcaacaacctccgctacaacaagggcctgctcgcctccgaccaggtgctcttcaccgaccgccgctcccgacccaccgtcaacctcttcgccgccaacgccaccgccttctacgaggcattcgtcgccgccatggccaagctcggcaggatcggcctcaagaccggcgccgacggcgagatacgccgcgtctgcaccgccgtcaactga

SEQ ID NO: 200 - protein, 346 aa, Zea mays
MRRGQGRGRGRGTAMARAGGGGPVRGAALVVVLLGIVVGAARAQLRQNYYGSSCPSAESTVRSVISQRLQQSFAVGPGTLRLFFHDCFVRGCDASVMLMAPNGDDESHSGADATLSPDAVDAINKAKAAVEALPGCAGKVSCADILAMAARDVVSLLGGPSYGVELGRLDGKTFNRAIVKHVLPGPGFNLDQLNALFAQNGLTQTDMIALSGAHTIGVTHCDKFVRRIYTFKQRLAWNPPMNLDFLRSLRRVCPLSYSPTAFAMLDVTTPRVFDNAYFNNLRYNKGLLASDQVLFTDRRSRPTVNLFAANATAFYEAFVAAMAKLGRIGLKTGADGEIRRVCTAVN

SEQ ID NO: 201 - DNA, 612 bp, Zea mays
  CDS (1)..(612)
atgccacctgcttcttctcataaacgcttccggcctcccggagacccggacacaaaccctagcattcaaccacgccgagctcgccggaacaagcccaacccgagcccaatcccgctcgggccccacccgatccggcggctcctcaccagtacaatccggggtaccccgcggatgctattctgtatcgggtccccacggtcgatgggttcgcccgggtccgccaatggcagacgcggcgactatgtgaggatcccggaggaggcggaggtggcgtccaagggggagggagatgccgcggcggccgtcaaggcggccgcggcggcggagtgccctagggtgctgcggtgcagcgcgatccggtggtgggccaaggtcgccgtgctcgggatcttccttgctggggccggagctgccgcggtcgtcttcctcggcccgctccttatcaagaagattgttgtacctattcttcactgggaatcaacaacattcagcagaccatctattgctctaatatgtttcggcacaatcgcattattcccaagtgttttgttaccttcttcgcccttcatgtggcttgcggggatgacttttggatatctttatggtttttga

SEQ ID NO: 202 - protein, 203 aa, Zea mays
MPPASSHKRFRPPGDPDTNPSIQPRRARRNKPNPSPIPLGPHPIRRLLTSTIRGTPRMLFCIGSPRSMGSPGSANGRRGDYVRIPEEAEVASKGEGDAAAAVKAAAAAECPRVLRCSAIRWWAKVAVLGIFLAGAGAAAVVFLGPLLIKKIVVPILHWESTTFSRPSIALICFGTIALFPSVLLPSSPFMWLAGMTFGYLYGF

SEQ ID NO: 203 - DNA, 810 bp, Zea mays
  CDS (1)..(810)
atgttgggggtgaaggcctggaagatggtggcgtggccagggtcggcgaggtgggcgaagaggttgtcgatggggccggtgccggtgtactcggcctggaaccaagcgcccatgacggcgagcatggcgaggcgtccgttcttgatctccttggtgcgcagctccttgatcttctccggcgagccggagccccagccgagcgggtcaaaccacaggccaccagggtacccgacgtcggtgccggtgagcttgttgctggggaagatgggatcggtgttgacgcttccgggcttgatgatgtcagcccaacggcggccctcggcccagccgatgaggatgagctcgatgatgaagagggtggtggtgtcggtgaagtactgctgctcgccggcggtgtaccagaagggcgtgttgaggacgccgatcttggtcaggaactccgggatgaagatacccgccgcgccgagcatcgcccaccggcagtgcaccagctccgcctgcacgttccaccgcaggctctccgggtcagatccgaggccccagggatcaaagccgaagtcgccgggaaggctgccgtcgagccacggcggaggggtgctgccggggaaccagatcggcctgtcggaatccgccgcggcgcgcacggcgaacgacggccgggctgcctcggcctgcctcagcagcgtcttgccgacgaggaaggaggaagaggaggaggaggagaacaacgacgacgacgcccgctgctgcccattcctggggagcgccgcgacggcggtggtggaggacgaggaggcggacacgagttga

SEQ ID NO: 204 - protein, 269 aa, Zea mays
MLGVKAWKMVAWPGSARWAKRLSMGPVPVYSAWNQAPMTASMARRPFLISLVRSSLIFSGEPEPQPSGSNHRPPGYPTSVPVSLLLGKMGSVLTLPGLMMSAQRRPSAQPMRMSSMMKRVVVSVKYCCSPAVYQKGVLRTPILVRNSGMKIPAAPSIAHRQCTSSACTFHRRLSGSDPRPQGSKPKSPGRLPSSHGGGVLPGNQIGLSESAAARTANDGRAASACLSSVLPTRKEEEEEEENNDDDARCCPFLGSAATAVVEDEEADTS

SEQ ID NO: 205 - DNA, 1701 bp, Zea mays
  CDS (1)..(1701)
atggctccgcttctcgctgctgccatgaaccacgctgcagcccatcctggccttaggagccacctagtaggacccaacaatgagagtttctcacggcaccacctgccgtcttcttctccacagagcagcaagcgaaggtgtaaccttagctttactacacgatctgcaagagtaggcagccaaaatggagtccaaatgttgagcccctcggaaatcccacaaagggactggttcccctctgacttcaccttcggtgccgccacttcagcgtaccaaattgaaggtgcttggaatgaagatggaaagggggaaagcaactgggatcacttctgccacaatcatccggaaaggatactggacgggagcaattcagacattggagcgaattcgtaccatatgtacaaaacggacgtcagattgctcaaggaaatgggcatggacgcatataggttctctatctcttggcccagaatactgccgaagggaaccaaagaaggaggtattaacccggatggcatcaagtactacagaaacctcatcaacttgttgctagaaaacggcatagagccatatgtaacaattttccactgggatgtacctcaagcactagaagagaagtacggcggcttcctagataagagtcataagagcattgtagaagattacacatactttgctaaggtgtgctttgataacttcggcgacaaggtgaagaattggttgacctttaatgagccccagacatttacttccttttcctacggaactggggtctttgccccaggtcggtgctcacctggactagactgtgcctacccaactgggaattcactcgtcgagccttacactgctggccataacattctcctagcccacgctgaggctgttgatctttacaacaagcattacaagcgcgacgacacccgcatagggcttgcgtttgacgtaatgggtcgtgtgccatacggaacatcgtttctggataaacaggccgaagaaaggtcctgggacatcaacctaggatggttcttagagccagtggttcgtggtgactaccccttctccatgagatcattggctagggaacgactacccttcttcaaggacgagcagaaggagaagctcgccggttcctataacatgttggggttaaactactacacctcacggttctccaaaaacatcgatatctcaccaaactactcacctgtgctcaacactgacgacgcctacgccagtcaagaagttaacgggcctgacgggaagcccattggtcctcctatgggaaatccatggatctacatgtaccctgagggcttgaaggatctccttatgatcatgaagaacaaatacggaaacccacctatctacatcacggagaacggaatcggggatgttgataccaaggagacacctctacccatggaggatgccttaaatgactacaaaaggctagattacatccagcgccacatcgctactcttaaggaatcaatagacttgggatcaaatgtgcaaggctacttcgcttggtctctgctggacaactttgaatggttcgccggcttcaccgaacgttatggcattgtctacgtcgaccgcaacaataactgcacgcgctacatgaaggagtctgccaagtggttgaaacagttcaacgccgcgaagaagcccagcaagaagattcttacgccagcttga

SEQ ID NO: 206 - protein, 566 aa, Zea mays
MAPLLAAAMNHAAAHPGLRSHLVGPNNESFSRHHLPSSSPQSSKRRCNLSFTTRSARVGSQNGVQMLSPSEIPQRDWFPSDFTFGAATSAYQIEGAWNEDGKGESNWDHFCHNHPERILDGSNSDIGANSYHMYKTDVRLLKEMGMDAYRFSISWPRILPKGTKEGGINPDGIKYYRNLINLLLENGIEPYVTIFHWDVPQALEEKYGGFLDKSHKSIVEDYTYFAKVCFDNFGDKVKNWLTFNEPQTFTSFSYGTGVFAPGRCSPGLDCAYPTGNSLVEPYTAGHNILLAHAEAVDLYNKHYKRDDTRIGLAFDVMGRVPYGTSFLDKQAEERSWDINLGWFLEPVVRGDYPFSMRSLARERLPFFKDEQKEKLAGSYNMLGLNYYTSRFSKNIDISPNYSPVLNTDDAYASQEVNGPDGKPIGPPMGNPWIYMYPEGLKDLLMIMKNKYGNPPIYITENGIGDVDTKETPLPMEDALNDYKRLDYIQRHIATLKESIDLGSNVQGYFAWSLLDNFEWFAGFTERYGIVYVDRNNNCTRYMKESAKWLKQFNAAKKPSKKILTPA

SEQ ID NO: 207 - DNA, 1452 bp, Zea mays
  CDS (1)..(1452)
atggcacgagggagcagctcccctgcccctcgcagcggctactctacaggtctagcgactctttcgccatccatagagggaggaggcgcggcggagatggtgggcggtggcggcggcgggccgctgcggcgggtgggcaagtacgaggtgggacgcaccatcggggaaggcaccttcgccaaggtcaagttcgcgcagaacaccgagaccggggagagcgtcgccatgaaggtgctcgaccgctcctccatcctcaagaacaagatggccgaacagattaagagagaaatatccataatgaagcttgtcaggcatcccaatgtcgttaggctacacgaggttttggcaagccggaagaagatatttataattctggagttcatcactggcggcgagctattcgataaaattattcgtcatgggagactcagtgaagcagatgcccgcagatactttcagcagcttattgatggtgttgatttttgtcacaagaaaggagtctaccatcgagacttaaagcctgaaaatctcctccttgattcccaaggcaatcttaaaatttcagactttggactgagtgcatggcctgctcagggatctttccttctacgtacaacctgtgggactccgaactatgttgccccagaggttctcagtcataagggatataatggcgcacttgctgatacatggtcatgtggagtaattttatatgtattgttagcaggttatcttccatttgatgaagtggacctgactaccctttatggaaagattgagagtgcagaatattcattcccagcctggttttcaggtggtgcaaaatcactgattcgtagaattcttgacccaaatccagagacacgaatcaggatagaagagatcagaagcgatgaatggtttcagaaaaattatgaacctatcaaagaaatagaaaatgaggaagtcaatctcgatgatgtcaatgcagcttttgatgatcctgaggacgataatgaggatgctttcgaagatgaaacaggtcctctaacacttaatgcattcgacctaatcattctttcgcaaggattgaatcttgcagcgctctttgaccgcagacaggactgtgacaagcttcaaaatagattcttatcacgcaatccagcaaaggttatcttgtcaagcatggaggttgttgcgcaatcaatgggatttaagacacacattcgcaattataagatgagggtggaaggtctaaatgccgacaagactagtcatctctcagttatggttgaagttttcgaagttgctccatcaatcttcatggtagaactacaaagagcagcaggagatacttcagagtataacacgttcgtaaataactactgcggcaaattagatgatatcatctggaaatttccaactgagaagggaaaatcaaggataccccggttatcaaagtctcattcatga

SEQ ID NO: 208 - protein, 483 aa, Zea mays
MARGSSSPAPRSGYSTGLATLSPSIEGGGAAEMVGGGGGGPLRRVGKYEVGRTIGEGTFAKVKFAQNTETGESVAMKVLDRSSILKNKMAEQIKREISIMKLVRHPNVVRLHEVLASRKKIFIILEFITGGELFDKIIRHGRLSEADARRYFQQLIDGVDFCHKKGVYHRDLKPENLLLDSQGNLKISDFGLSAWPAQGSFLLRTTCGTPNYVAPEVLSHKGYNGALADTWSCGVILYVLLAGYLPFDEVDLTTLYGKIESAEYSFPAWFSGGAKSLIRRILDPNPETRIRIEEIRSDEWFQKNYEPIKEIENEEVNLDDVNAAFDDPEDDNEDAFEDETGPLTLNAFDLIILSQGLNLAALFDRRQDCDKLQNRFLSRNPAKVILSSMEVVAQSMGFKTHIRNYKMRVEGLNADKTSHLSVMVEVFEVAPSIFMVELQRAAGDTSEYNTFVNNYCGKLDDIIWKFPTEKGKSRIPRLSKSHS

SEQ ID NO: 209 - DNA, 1173 bp, Zea mays
  CDS (1)..(1173)
atgccggactcatccgcctccgccgtcgggaggaccccgcgctcgcgcgtcgtcgcaccacgccgctgggacgttgaactgcgccggcttgcccgatgccgccccgctcgtctggggacgacagctccgcccgtcgctcctcctccccgccacactgctcccgtcgtcgtcgcaggccgccaggaggcacacgccacggcggcccgcgcagccgcaggggagaccaagtctgtgggtttcctggagaagtacccggccctggtcaccggcttcttcttcttcatgtggtacttcctcaacgtcatattcaacatcctcaacaagaagatctacaactacttcccctatccatactttgtgtccttgatccatctagtagtgggtgtcgtatactgcctcatcagctggagtgtcggtctccccaagcgagcgcctatcaatggcacgctcctcaagcttctctttccagtcgccctgtgccatggtattggtcacatcactagcaatgtgtccttcgctgctgttgcagtctcatttgctcacactatcaaagctctggagcccttcttcagcgcagcggctactcagtttatccttggacagcaagttcccttctctctgtggctttctcttgcccctgtggtcattggtgtttcaatggcatcccttactgagctttcattcaactggactggcttcatcaatgccatgatatcaaacatctcattcacttacaggagcatttattccaagaaagctatgactgacatggatagcaccaacgtgtatgcttacatctcaataatcgctctaattgtttgcattccacctgcattgatctttgaagggcccaagctaatgcagcatggatttagtgatgccattgcaaaagtaggtttgacaaagtttgtcagtgacctattcttggttggactgttctaccatctgtataaccagattgctacaaacaccttggagcgagtggctcctctgacacatgctgtcggcaatgtgttgaaacgtgtttttgtcatcggtttctcaatcattgtttttggcaacaaaattagcacacaaactggaattggcacgtccattgccatagctggtgttgctatgtactcttacattaaggctaagattgaagaggagaaaaggaaaaagagcgcatga

SEQ ID NO: 210 - protein, 390 aa, Zea mays
MPDSSASAVGRTPRSRVVAPRRWDVELRRLARCRPARLGTTAPPVAPPPRHTAPVVVAGRQEAHATAARAAAGETKSVGFLEKYPALVTGFFFFMWYFLNVIFNILNKKIYNYFPYPYFVSLIHLVVGVVYCLISWSVGLPKRAPINGTLLKLLFPVALCHGIGHITSNVSFAAVAVSFAHTIKALEPFFSAAATQFILGQQVPFSLWLSLAPVVIGVSMASLTELSFNWTGFINAMISNISFTYRSIYSKKAMTDMDSTNVYAYISIIALIVCIPPALIFEGPKLMQHGFSDAIAKVGLTKFVSDLFLVGLFYHLYNQIATNTLERVAPLTHAVGNVLKRVFVIGFSIIVFGNKISTQTGIGTSIAIAGVAMYSYIKAKIEEEKRKKSA

SEQ ID NO: 211 - DNA, 777 bp, Zea mays
  CDS (1)..(777)
atgaccggagaaggtctggatgatggtgttgtgccatgggtcagacaggtgctgcagcaggttgtcgaagggccccttgccggtgacgttgtgctggatcaggaagcccaggaacgccagcatcgccagcctcccgttggcgagctccttctccttggcctcgagcgtgggcgcgaagttgagcgggttgaagacgctgcccgggtagccgcactcgtgcggcggcaggctgtagctcttgaagatggggtcctggttgacgctgccggggttcttgatgtcctgccaccgccggatctccacgtagtggaacaggatgaactcgaccacgaacagcgtggacgacgacgcgaagtactccgacttgccggcgtcgtaccactgcggcgcgttgatcagcccggctttggtcagcacctccgggatgagcatcccggccacgccaagcatggcccaccggccgttcaccagctccgcctgcacgaaccaccgcaggttctcggggtcctccgccaggcccaacgggtcgaagccattgtcacccgccaggctgccgtcgaggtaggagggggagggaaggccggggagccactcgcccttggcctccgccttgaggctgcgcctcgtgggagacgcggtgcggccgaggcggctagagtggccaaggaaggccgacgacgacttgagcgatgccgacgacgggcgaagggccgctaccggggcgcgggcggtgacggacgccatgcttcccggggactgggagcgaggagatggtga

SEQ ID NO: 212 - protein, 258 aa, Zea mays
MTGEGLDDGVVPWVRQVLQQVVEGPLAGDVVLDQEAQERQHRQPPVGELLLLGLERGREVERVEDAARVAALVRRQAVALEDGVLVDAAGVLDVLPPPDLHVVEQDELDHEQRGRRREVLRLAGVVPLRRVDQPGFGQHLRDEHPGHAKHGPPAVHQLRLHEPPQVLGVLRQAQRVEAIVTRQAAVEVGGGGKAGEPLALGLRLEAAPRGRRGAAEAARVAKEGRRRLERCRRRAKGRYRGAGGDGRHASRGLGARRW

SEQ ID NO: 213 - DNA, 768 bp, Zea mays
  CDS (1)..(768)
atgcccggtcgacgatttcggctctgcagtactattcatcttccattgttgctttgctttgctttgcttaccggcaaccatggccagcactcgtgcagcagcaactctccttttgctcctcgcgctcgccggcacctcgtcggcgcagtgtccacgggcttctactcctactcgtgccccggcgtgtacggcgccgtcaagtcggtgatgcagtccgccatcgccagggagaagcgcatgggggcctccatcctccgcctcttcttccacgactgcttcgtccagggctgcgacgcgtcgctgctgctggacgacacgcccagcttccagggcgagaagatggccaaccctaacaacggctccgtcaggggattcgaggtcatcgacgccgtcaagtccgccgtcgagaaggtgtgccccggcgtcgtctcctgcgccgacatcctcgccatcgccgccagggacagcgtcgtcatcctgggtggtccgacctgggacgtgaaggtcgggcggcgggactccacgacggcgagcttcagcggcgccaacaacaacatcccgccgccgacgtcgggcctcgccaacctcacgtcgctcttcgccgcgcaaggactttctcagaaggacatggtcgcgctctctggtgctcacaccatcgggcaggcacgctgcaccaacttcagagcccacatctacaacgacaccgacatcgacgctgccttcgcgagaacgaggcagtcaggctgcccaagcacctcaggctcatga

SEQ ID NO: 214 - protein, 255 aa, Zea mays
MPGRRFRLCSTIHLPLLLCFALLTGNHGQHSCSSNSPFAPRARRHLVGAVSTGFYSYSCPGVYGAVKSVMQSAIAREKRMGASILRLFFHDCFVQGCDASLLLDDTPSFQGEKMANPNNGSVRGFEVIDAVKSAVEKVCPGVVSCADILAIAARDSVVILGGPTWDVKVGRRDSTTASFSGANNNIPPPTSGLANLTSLFAAQGLSQKDMVALSGAHTIGQARCTNFRAHIYNDTDIDAAFARTRQSGCPSTSGS

SEQ ID NO: 215 - DNA, 1572 bp, Zea mays
  CDS (1)..(1572)
atgagggaactgcgagctgctgccacccctgctgccgcggtcgaccgccggccccggaccgagatggacgctcggtgggcggtgctgctcgcgctgctggtcgccagcggcggcgtccgtgtctgcgccgccgctggggccaagggcgccaactggctgggcgggctgagccgcgcgtcgttccccaaggggttcgtgttcgggacggcgacgtcggcgtaccaggtcgagggcgccgcgtccaccaacggccggggcccctccatctgggattcattcgcgcacgtcccaggaaatattgcagggaatcaaaatggagacgttgcagtggatcaataccatcgctacaaggaagacgtcgatctcatgaaaagtttgaactttgatgcctaccggttctcaatctcatggtccaggatcttcccggatggcgaagggaaagtcaatccagaaggtgtagcgtattacaataatttgataaactatctgcttcagcaaggcatgactccttacatcaacctttaccactatgatcttcctcttgcgcttgagaagaaatatggagggtggttaagcgcgaagatggcggacttgtttacagactatgctgacttctgttttaagacctacggcgatcgcgtaaagcactggtttacattcaatgagccaaggatagtagcgctacttggctatgacacagggtcaaatcctcctcaaaggtgcaccagatgcgctgctggtgggaattcagcaaccgaaccttacatagttgctcataattttctcttggcacatgctactgcagttgcaagataccgtacgaaatatcaggctgctcagaagggtaaggtcggaatagtcctggacttcaactggtacgaggctcttacaaactcacctgatgaccaagcagcagcccaaagagccagggacttccacattggctggtttgttgatccattgataaacggacactatccacagataatgcaagatctcgtgaaggagaggctgcccaggttcactcctgagcaggctaaactggtgaagggctcggcagactacatcggtatcaacgagtacacatccagctacatgaaggggcagaagctggtccagctggcgcccagtagctactctgccgattggcaggttcaatatgtttttgcacgcaatggcaaaccgattggaccacaggcgaattctaagtggctctacatcgccccgacggggatgtacgggtgcgtgaactacctcaaggagaagtatgggaatccaacgatctacataacggagaacggaatggaccagcctggaaacttgacccgagaccagtacctgcgcgacgccacgagggtgcggttctacaggagctacatcggccagctgaagaaggccatagaccagggagcgaacgtggctggctacttcgcctggtctctcctcgacaacttcgagtggctggcagggtactcgtccaagttcggcatcgtctacgtggacttcaacacgctcgaacgccacccgaaggcgtcggcctactggttcagggacatgcttcagaagcattga

SEQ ID NO: 216 - protein, 523 aa, Zea mays
MRELRAAATPAAAVDRRPRTEMDARWAVLLALLVASGGVRVCAAAGAKGANWLGGLSRASFPKGFVFGTATSAYQVEGAASTNGRGPSIWDSFAHVPGNIAGNQNGDVAVDQYHRYKEDVDLMKSLNFDAYRFSISWSRIFPDGEGKVNPEGVAYYNNLINYLLQQGMTPYINLYHYDLPLALEKKYGGWLSAKMADLFTDYADFCFKTYGDRVKHWFTFNEPRIVALLGYDTGSNPPQRCTRCAAGGNSATEPYIVAHNFLLAHATAVARYRTKYQAAQKGKVGIVLDFNWYEALTNSPDDQAAAQRARDFHIGWFVDPLINGHYPQIMQDLVKERLPRFTPEQAKLVKGSADYIGINEYTSSYMKGQKLVQLAPSSYSADWQVQYVFARNGKPIGPQANSKWLYIAPTGMYGCVNYLKEKYGNPTIYITENGMDQPGNLTRDQYLRDATRVRFYRSYIGQLKKAIDQGANVAGYFAWSLLDNFEWLAGYSSKFGIVYVDFNTLERHPKASAYWFRDMLQKH

SEQ ID NO: 217 - DNA, 1218 bp, Zea mays
  CDS (1)..(1218)
atgtctccacctccagtacaagtgagttcaccaccgccggcgcctaagtcatcacctccacttgctccagtgagttcaccacctcaagtagagaagacttctccaccaccagcaccactcagctcaccaccattggcgcccaagtcatcacctccacatgttgttgtgagctcaccacctccagtggtgaagtcctctccaccacctgcaccggttagctcgccaccattgacgcctaagccggcaagcccacctgcgcatgtgagctcaccacctgaagtggtgaagccatccacaccaccggcaccaacaacagtcatctcacctccatcagagcccaagtcatcaccgccacctactcccgtgagcttgccacctccaatagttaagtcctctccaccaccggcaatggttagctcaccaccgatgacgcctaagtcgtcacctccaccggttgttgtgagctcaccaccaccaacggtgaagtcttctccaccaccggcaccagtcagctcaccaccagcgacacctaagtcgtcacctccacctgctcctgtgaacttgccacctccagaagtaaagtcttctccaccacctacaccagttagctcgccaccgccagcgcctaagtcatcacctccacctgctcccatgagctcgccaccacctccagaggtgaagtctcctccaccaccagctccagttagctcgcctccacctccagtcaagtcgccacctccacccgcccctgtgagctcacctcctccccctgtgaagtctccaccaccaccagcaccggtcagctcgccaccacctccagtgaagtcaccgccacctccagcaccgatcagctcaccaccacctccagtgaagtcaccgccacctccagcaccagtgagctcaccaccacctccagtgaagtctcctccgccaccagcaccagttagctccccaccacccccaataaaatctcctcctccaccggcaccagttagctctcctccaccagcaccagtgaagccaccatcactaccaccaccggccccagtaagctcacctcctccggttgtcacccctgccccgccgaagaaagaagagcagtcattaccaccaccagcagaatcccaacctccaccatcattcaatgacatcatccttccacctatcatggccaacaagtacgcatctccgcctccccctcagttccaagggtattga

SEQ ID NO: 218 - protein, 405 aa, Zea mays
MSPPPVQVSSPPPAPKSSPPLAPVSSPPQVEKTSPPPAPLSSPPLAPKSSPPHVVVSSPPPVVKSSPPPAPVSSPPLTPKPASPPAHVSSPPEVVKPSTPPAPTTVISPPSEPKSSPPPTPVSLPPPIVKSSPPPAMVSSPPMTPKSSPPPVVVSSPPPTVKSSPPPAPVSSPPATPKSSPPPAPVNLPPPEVKSSPPPTPVSSPPPAPKSSPPPAPMSSPPPPEVKSPPPPAPVSSPPPPVKSPPPPAPVSSPPPPVKSPPPPAPVSSPPPPVKSPPPPAPISSPPPPVKSPPPPAPVSSPPPPVKSPPPPAPVSSPPPPIKSPPPPAPVSSPPPAPVKPPSLPPPAPVSSPPPVVTPAPPKKEEQSLPPPAESQPPPSFNDIILPPIMANKYASPPPPQFQGY

SEQ ID NO: 219 - DNA, 882 bp, Zea mays
  CDS (1)..(882)
atggcacgagccgcctttcctctctctcgctctcctcctctcctctcctctccttccgcatcacacaccacgactcccaaccgccggttggctttgctgctccgagctcttcctcttccacacccgccctctctcttgtgggtcggcggccgagtgtctgcgtcgtccacggagatcagggatcggcggcggggtatggcgagggagcgtcgggagataaagaggatagagagcgcggcggcgcggcaggtcacgttctccaagcgccgccgcggcctcttcaagaaggctgaggagctctccgtgctgtgcgatgccgacgtcgcgctcatcgtcttctcctccacgggaaagctctcccagttcgccagctccagtatgaatgagatcattgacaagtacagcacacattctaaaaacctggggaaagcagaacagccttcacttgacttgaacttagaacatagcaaatatgcaaatttgaatgagcaacttgtggaagcaagccttcgactcaggcagatgagaggtgaagaacttgagggattgagtgttgaagaactccagcaattggagaagaatctggaatctggtctgcatagggtccttcaaacaaaggatcaacaattcttggaacagatcagcgacctcgaacaaaagagtacacaactggcagaggagaacaggcaactgaggaatcaagtatcccacatacccccagttggcaagcaatcagttgctgatactgaaaatgttatcgctgaagatgggcaatcctctgaatcagtcatgactgcgttgcattctgggagttcacaggataatgatgatggttcggatgtctctctaaaattagggctgccttgtgttgcatggaagtga

SEQ ID NO: 220 - protein, 293 aa, Zea mays
MARAAFPLSRSPPLLSSPSASHTTTPNRRLALLLRALPLPHPPSLLWVGGRVSASSTEIRDRRRGMARERREIKRIESAAARQVTFSKRRRGLFKKAEELSVLCDADVALIVFSSTGKLSQFASSSMNEIIDKYSTHSKNLGKAEQPSLDLNLEHSKYANLNEQLVEASLRLRQMRGEELEGLSVEELQQLEKNLESGLHRVLQTKDQQFLEQISDLEQKSTQLAEENRQLRNQVSHIPPVGKQSVADTENVIAEDGQSSESVMTALHSGSSQDNDDGSDVSLKLGLPCVAWK

SEQ ID NO: 221 - DNA, 1350 bp, Zea mays
  CDS (1)..(1350)
atgtatcgggctaagagggctgcattgtcaccgaaggtgaagcgccgcgtcggcaagtacgagctcgggcgcaccattggggaagggaccttcgccaaggtccggtttgcgaagaacaccgaaaacggggaacctgttgctatcaaaatccttgacaaggagaaggttaagaggcacagattggttgagcagattaagcgtgaaatttgtatcatgaaattagtaaggcaccctaatgttgttcgactgtttgaggtgatgggaagtaaagcaagaattttcatcgttctggaatatgttaccggcggagagctttttgaaatcattgctactaatggaaggttgaaggaagacgaagcacgtaaatacttccagcaactgattaatgctgttgattactgccacagtaggggagtgtatcacagagacttgaagctcgagaatttgctgcttgatgctgcaggaaatctcaaagtttctgactttggtttaagtgctttaaccgagcaagtgaaggctgatggtctgcttcatacaacatgtggaacccccaattatgttgcccctgaggtgatcgaggatggaggctatgatggtgcaactgcagatatttggtcttgcggagtaatcctctttgttcttcttgctggatatttacctttcgaggatgacaacatcatcgccctatacaagaagatttcagaagctcagtttagctgcccctcttggttttcagctggggccaagaacatgattaccagaattcttgatcccaatcctacaactagaatcacgatttctcagatactggagcatccttggttcaaaaaggggtacaagcctcctgtttttgacgagaaatatcaaactagcttggatgacgtggatgctgcttttggagattcagaagaccggcatgtgaaagaggaaactgaagatcagccaacctcaatgaatgcattcgaactgatttcactaaaccaggcactgaatctggagaatttgtttgaagcaaaggaggagtataaaagagagacaagattcacctcacagtgccccccgaaagagataatcacaaagatcgaagaagctgcaaagccgcttggctttgatgttcaaaagaaaaaatacaagatgcggatggagaacccgaaagcaggtagaaagggcaatctgaatgttgcaactgaggtcttccaaatagccccatccctgcatgtagtcgagctcaagaaggcgaagggggacactctggagttccaaaagttctacagaagcctgtcgacccagctgaaggatgttgtgtggaagtgcgacggcgaggtggacggcaacagcgcggcagcatga

SEQ ID NO: 222 - protein, 449 aa, Zea mays
MYRAKRAALSPKVKRRVGKYELGRTIGEGTFAKVRFAKNTENGEPVAIKILDKEKVKRHRLVEQIKREICIMKLVRHPNVVRLFEVMGSKARIFIVLEYVTGGELFEIIATNGRLKEDEARKYFQQLINAVDYCHSRGVYHRDLKLENLLLDAAGNLKVSDFGLSALTEQVKADGLLHTTCGTPNYVAPEVIEDGGYDGATADIWSCGVILFVLLAGYLPFEDDNIIALYKKISEAQFSCPSWFSAGAKNMITRILDPNPTTRITISQILEHPWFKKGYKPPVFDEKYQTSLDDVDAAFGDSEDRHVKEETEDQPTSMNAFELISLNQALNLENLFEAKEEYKRETRFTSQCPPKEIITKIEEAAKPLGFDVQKKKYKMRMENPKAGRKGNLNVATEVFQIAPSLHVVELKKAKGDTLEFQKFYRSLSTQLKDVVWKCDGEVDGNSAAA

SEQ ID NO: 223 - DNA, 861 bp, Zea mays
  CDS (1)..(861)
  misc_feature (19)..(80): n at positions 19 and 80 is a or g or c or t/u
atggccatcgacacgatcngcgagcgcaagcacgtacgttgtcggaagctcaagttagaagaagcaccagtgcctgatcngatggcggcccaggctctcctctccggccggcagctgctgggccgccccgtgcagtcggccgtctctaggtcgtcggcgaggaaggcgcccttcgtcgtcagggccagctccagccctccagccaagcaaggtgccgacaggcagctgtggttcgcgtccaagcagtccctctcctacctcgatggcacgctgcccggcgactatggcttcgacccgctgggcctctcggacccggagggcaccgggggcttcatcgagcccaagtggctggcctatggcgaggtgatcaacggccgctacgccatgctgggcgcggtgggcgccatcgccccggagatcttcggcaagatgggcatcatccccccggagaccgcgctgccgtggttcaagacgggcgtcatcccgcccgcgggcacctacaactactgggccgactcctacacgctcttcgtcttcaacatggcgctcatgggcttcgccgagcaccgccgcctccaggactggtacaacccgggctccatgggcaagcagtacttcctcggcctcgagaagttcctcgccggctccggcgacccgtcctaccccggcgggcccctcttcaacccgctcggcttcggcaagaccgagaaggagatgaatgagctcaagctcaaggagatcaagaacggcaggctcgccatgctcgccatcctcggttacttcatccaggggctcgtcaccggcgtcggcccgttccagaacctgctcgaccacctcgccgaccccgtcaacaacaactga

SEQ ID NO: 224 - protein, 286 aa, Zea mays
  misc_feature (7)..(7): Xaa can be Ser or Arg or Gly or Cys
  misc_feature (27)..(27): Xaa can be Arg or Gln or Leu or Pro
MAIDTIXERKHVRCRKLKLEEAPVPDXMAAQALLSGRQLLGRPVQSAVSRSSARKAPFVVRASSSPPAKQGADRQLWFASKQSLSYLDGTLPGDYGFDPLGLSDPEGTGGFIEPKWLAYGEVINGRYAMLGAVGAIAPEIFGKMGIIPPETALPWFKTGVIPPAGTYNYWADSYTLFVFNMALMGFAEHRRLQDWYNPGSMGKQYFLGLEKFLAGSGDPSYPGGPLFNPLGFGKTEKEMNELKLKEIKNGRLAMLAILGYFIQGLVTGVGPFQNLLDHLADPVNNN

SEQ ID NO: 225 - DNA, 912 bp, Zea mays
  CDS (1)..(912)
  misc_feature (68)..(870): n at positions 68 and 870 is a or g or c or t/u
atggatcgcgagcgcaagcacgtacgttgtcggaagctcaagttagaagaagcaccagtgcctgatcngatggcggcccaggctctcctctccggccggcagctgctgggccgccccgtgcagtcggccgtctctaggtcgtcggcgaggaaggcgcccttcgtcgtcagggccagctccagccctccagccaagcaaggtgccgacaggcagctgtggttcgcgtccaagcagtccctctcctacctcgatggcacgctgcccggcgactatggcttcgacccgctgggcctctcggacccggagggcaccgggggcttcatcgagcccaagtggctggcctatggcgaggtgatcaacggccgctacgccatgctgggcgcggtgggcgccatcgccccggagatcttcggcaagatgggcatcatccccccggagaccgcgctgccgtggttcaagacgggcgtcatcccgcccgcgggcacctacaactactgggccgactcctacacgctcttcgtcttcaacatggcgctcatgggcttcgccgagcaccgccgcctccaggactggtacaacccgggctccatgggcaagcagtacttcctcggcctcgagaagttcctcgccggctccggcgacccgtcctaccccggcgggcccctcttcaacccgctcggcttcggcaagaccgagaaggagatgaatgagctcaagctcaaggagatcaagaacggcaggctcgccatgctcgccatcctcggttacttcatccaggggctcgtcaccggcgtcggcccgttccagaacctgctcgaccacctcgccgaccccgtcaacaacaacgtgctcaccagcctcaagttccanctagaacgtggtgcatcagcatacctgctgctgccgccgtga

SEQ ID NO: 226 - protein, 303 aa, Zea mays
  misc_feature (23)..(23): Xaa can be Arg or Gln or Leu or Pro
  misc_feature (290)..(290): Xaa can be Gln or His
MDRERKHVRCRKLKLEEAPVPDXMAAQALLSGRQLLGRPVQSAVSRSSARKAPFVVRASSSPPAKQGADRQLWFASKQSLSYLDGTLPGDYGFDPLGLSDPEGTGGFIEPKWLAYGEVINGRYAMLGAVGAIAPEIFGKMGIIPPETALPWFKTGVIPPAGTYNYWADSYTLFVFNMALMGFAEHRRLQDWYNPGSMGKQYFLGLEKFLAGSGDPSYPGGPLFNPLGFGKTEKEMNELKLKEIKNGRLAMLAILGYFIQGLVTGVGPFQNLLDHLADPVNNNVLTSLKFXLERGASAYLLLPP

SEQ ID NO: 227 - DNA, 744 bp, Zea mays
  CDS (1)..(744)
atgttgctagcgtttcctggattggggacgcttccgtttcgggaagccgtgaagggatcggccacgacgatggtgcgggggaagacggagctgaagcggatagagaacgcgacgagccggcaggtgaccttctcgaagcgccgcaacgggctgctcaagaaggccttcgagctctccgtgctctgcgatgctgaggtcgggctcgtcgtcttctccccgcgcggcaagctctacgagttcgccagcgccgccagcctccagaaaacaattgaccgctacaggacatacacaagggaaaatgtcaataacaagactgttcaacaagatatacagcaagtcaaagcagatgccgtaagcttggcaagtagactcgaagccctagaaaagaccaaacgaatgtttctgggtgaaaatttagaagaatgctccattgaagaactgcataatctggaggttaaactggcgaagagccttcacgtcatcagagggaagaagacacaactgctggagcagcagatatccaagctgaaggagaaggagaggaccctgctccaagacaacaaagagttgcgggataagcagcgcaacctccagtctccaccggaggcgccaccggacctgaaccgctgtgtccctccttggccgcgtagcctgccggcaccgagcaatgacatggacgtggagacggagctgtacataggattacccggcagggagcgctcctccaaccgggactctgattga

SEQ ID NO: 228 - protein, 247 aa, Zea mays
MLLAFPGLGTLPFREAVKGSATTMVRGKTELKRIENATSRQVTFSKRRNGLLKKAFELSVLCDAEVGLVVFSPRGKLYEFASAASLQKTIDRYRTYTRENVNNKTVQQDIQQVKADAVSLASRLEALEKTKRMFLGENLEECSIEELHNLEVKLAKSLHVIRGKKTQLLEQQISKLKEKERTLLQDNKELRDKQRNLQSPPEAPPDLNRCVPPWPRSLPAPSNDMDVETELYIGLPGRERSSNRDSD

SEQ ID NO: 229 - DNA, 774 bp, Zea mays
  CDS (1)..(774)
atgaagctaaccaccagacccccggccatggcgctcgcgcccacttccgctgccgtgctcaagaccccgttcctcggggccaggcgcgcgctcgccaatgccgccgccaagcccgcgcctcgccgcgcgctggtcgtcgccgccgcggccgccgccaagaagtcgtggatcccggccatcaagagcgacgccgagatcgtgaacccgccctggctcgacggctcgctccccggcgacttcgggttcgacccgctggggctgggcaaggacccggcgttcctcaagtggtaccgggaggcggagctgatccacgggcggtgggcgatggcggccgtgctgggcatcttcgtggggcaggcgtggagcggcatcccgtggttcgaggccggcgcggacccgagcgccatcgcgcccttctccttcgggtcgctgctgggcacgcagctgctgctgatggggtgggtggagtcgaagcggtgggtggacttcttcaacccggactcccaggccgtggagtgggccacgccatggtcccgcaccgccgagaacttcgctaacttcaccggcgagcagggctacccgggcggcaagttcttcgacccgctcggcctcgccggcaccgtcaaggacggcgtctacatccccgacgtcgacaagctcgagcggctcaagctggccgagatcaagcacgcccgcatcgccatgcttgccatgctcgccttctacttcgaggctgggcagggcaagacgccgctcggcgcgctcggcctatga

SEQ ID NO: 230 - protein, 257 aa, Zea mays
MKLTTRPPAMALAPTSAAVLKTPFLGARRALANAAAKPAPRRALVVAAAAAAKKSWIPAIKSDAEIVNPPWLDGSLPGDFGFDPLGLGKDPAFLKWYREAELIHGRWAMAAVLGIFVGQAWSGIPWFEAGADPSAIAPFSFGSLLGTQLLLMGWVESKRWVDFFNPDSQAVEWATPWSRTAENFANFTGEQGYPGGKFFDPLGLAGTVKDGVYIPDVDKLERLKLAEIKHARIAMLAMLAFYFEAGQGKTPLGALGL

SEQ ID NO: 231 - DNA, 1362 bp, Zea mays
  CDS (1)..(1362)
atggagaagaagccgaccatcctcatgaacaggtacgagctcgggcgcacgctcgggcagggcaccttcgccaaggtgtaccacggccggaacctcgcgtccggcgagagcgtggccatcaaggtcatcgacaaggagaaggtgatgcgcgtcggcatgatcgaccagatcaagcgcgagatctccgtcatgcgcctcgtccgccaccccaacgtcgtgcagctgcacgaggtgatggccagcaagagcaagatatacttcgccatggagtacgtccggggcggcgagctcttcgcccgcgtcgcccgcggccggctcaaggaggacgccgcgagaaggtacttccaccagctcgtcggcgccgtcgacttctgccacagccgcggcgtctaccaccgcgacctcaagcccgagaacctcctcgtcgacgagcacggcaacctcaaggtctccgacttcggcctcagcgcgctcagggagtgccagaagcaggacggcctgctgcacaccacctgcggcacccccgcgtacgtcgcgccggagatcatcaacaagaagggctacgacggggccaaggccgacatctggtcctgcggcgtcatcctcttcgtgctcctcgccggctacctcccgttccacgacgccaacctggtggagatgtaccgcaagatcagcagagccgacgtcaagtacccgcagtggttctcccctgagctccggcggttgatgcccaagctcctcgaaccgaacccaaacaacaggatcacgatcgagaagctggtcgagcacccctggttcaagaaggggtacaggccggccgtcatgctggcacagccgcacggctccagcagcctcaaggatgtccaggtcgccttcagcaacgccgaccacaaggacagcagcagcaaggtggaacagccggcggacagctccttgaagccggcgagcctgaacgcgttcgacatcatctcccactccagagggttcgacctgtcaagcctgttcgaggtggaccaagagcagaaggccagcaactcgcggttcatgacccagaagccggcgtcggcgatagtgtcaaagctggagcagatcgctgagacagagcgcttcatggtgaaaaaacaggacgggctggtgaagctgcaggggtccaagcaagggaggaaggggcagctcgcgatcgacgccgagatcttcgaggtgacaccggcctttcacgtcgtcgaggtgaagaagtcggcaggcgacacgctggagtatgagatgttctgcagcaagggcctaagaccttcactcagcgacatctgctggagcagccgatctgaggagaacatggctccttcagtggttcagccatcatga

SEQ ID NO: 232 - protein, 453 aa, Zea mays
MEKKPTILMNRYELGRTLGQGTFAKVYHGRNLASGESVAIKVIDKEKVMRVGMIDQIKREISVMRLVRHPNVVQLHEVMASKSKIYFAMEYVRGGELFARVARGRLKEDAARRYFHQLVGAVDFCHSRGVYHRDLKPENLLVDEHGNLKVSDFGLSALRECQKQDGLLHTTCGTPAYVAPEIINKKGYDGAKADIWSCGVILFVLLAGYLPFHDANLVEMYRKISRADVKYPQWFSPELRRLMPKLLEPNPNNRITIEKLVEHPWFKKGYRPAVMLAQPHGSSSLKDVQVAFSNADHKDSSSKVEQPADSSLKPASLNAFDIISHSRGFDLSSLFEVDQEQKASNSRFMTQKPASAIVSKLEQIAETERFMVKKQDGLVKLQGSKQGRKGQLAIDAEIFEVTPAFHVVEVKKSAGDTLEYEMFCSKGLRPSLSDICWSSRSEENMAPSVVQPS

SEQ ID NO: 233 - DNA, 891 bp, Zea mays
  CDS (1)..(891)
atgcgggggaccgccgagagcctctgccaggggcggcttgacctcgacgacgacaagttcggcgcaatgtgcaccaccgcgttcggctgcctccaggagtggccggacctgggcgccatgtgcggtgcgaacgtcggcgtgcctgccatggccggcaacggcaacgattcctcttgcagcggcagcggcggatccaggaagaggaaaccggacgcgtacgacctcgatgccacgggtggtgcaaacgacatgagcaagagacccagagggaagcggccgtctggcctctctgagatcgtggcgccagggaaagggaagcaggagcggccaaaggcaggcacaaagaagaaggccgaggctgcatcggcggcggcggcggctgctgctgccggccataagaccgactacatccacgtccgggcccgccgcggccaggccacggacagccacagcctcgccgagcgggtgaggagggagaggatcagcgagcggatgcggtacctgcaggagctggtgcccgggtgcagcaaggtcacgggcaaggccggcatgctcgacgagatcatcaactacgtgcagtccctgcagaagcaagtcgagttcctgtccatgaagatcgccgcttccaacccggtggtgagcttcgacatcgtcgaggacctcttcggccggcagctgaagcagtcacgacgcagcccggcggcagccctgcccgcgatggctctgccggccggccagctggagccgtcctgccttcagatgagccacgtgccgcagatgcatccatctgcagcggcaaactccaccggatttgggctggacatggtcgtcaacaacccgtacgcgcccgccggcgcgagctgccctgtccctgtgtcggctgccgcgtga

SEQ ID NO: 234 - protein, 296 aa, Zea mays
MRGTAESLCQGRLDLDDDKFGAMCTTAFGCLQEWPDLGAMCGANVGVPAMAGNGNDSSCSGSGGSRKRKPDAYDLDATGGANDMSKRPRGKRPSGLSEIVAPGKGKQERPKAGTKKKAEAASAAAAAAAAGHKTDYIHVRARRGQATDSHSLAERVRRERISERMRYLQELVPGCSKVTGKAGMLDEIINYVQSLQKQVEFLSMKIAASNPVVSFDIVEDLFGRQLKQSRRSPAAALPAMALPAGQLEPSCLQMSHVPQMHPSAAANSTGFGLDMVVNNPYAPAGASCPVPVSAAA

SEQ ID NO: 235 - DNA, 783 bp, Zea mays
  CDS (1)..(783)
  misc_feature (631)..(733): n at positions 631 and 733 is a or g or c or t/u
atgcgcgggaaggtggtgctgcagcggatcgagaacaagatcagccggcaggtgaccttcgccaagcgccggaacggcctgctcaagaaggcgtacgagctctccatcctctgcgacgccgaggtcgcgctcgtcctcttctcccacgccggccgcctctaccagttctcatcctcctccaatctgcttaagactctagagcggtaccagaggtacatctatgcttcagccgatgctgcagtgccatctagcgatcagatgcagaataactatcaagaatatgtgaagctgaaggcacgagttgaggttttacagcactcacaaaggaatcttcttggtgaagatctggccctacttagcccaagtgaacttgaccagcttgagaatcaagtagacaagaccttgaagcaaataagatcaagaaagactcaagtgttacttgatgaactttgtgacttaaagagaaaggaacaaatgctgcaagatgcaaacagggttctgaaaaggaagctgggcgagtttgaggcagaggcggcttctcccccgcagttagcgtggcaaggcgaaggcggcatgttgtcccatgaccctccacagccagaacacttcttccaggctctggagagcaacnccatgtctgcaacctacataccatacgatggacatgaaccagcagccagtgccagcgccgggcggctgctatcctgcatggatgtcttagccagtgcttcantccattgccttgagaagtgtcctgaccttcacagatccctacgagcttga

SEQ ID NO: 236 - protein, 260 aa, Zea mays
  misc_feature (211)..(211): Xaa can be Thr or Pro or Ala or Ser
  misc_feature (245)..(245): Xaa can be Ile or Leu or Val or Phe
MRGKVVLQRIENKISRQVTFAKRRNGLLKKAYELSILCDAEVALVLFSHAGRLYQFSSSSNLLKTLERYQRYIYASADAAVPSSDQMQNNYQEYVKLKARVEVLQHSQRNLLGEDLALLSPSELDQLENQVDKTLKQIRSRKTQVLLDELCDLKRKEQMLQDANRVLKRKLGEFEAEAASPPQLAWQGEGGMLSHDPPQPEHFFQALESNXMSATYIPYDGHEPAASASAGRLLSCMDVLASASXHCLEKCPDLHRSLRA

SEQ ID NO: 237 - DNA, 684 bp, Zea mays
  CDS (1)..(684)
atgcatcaaataagatctagcagcttacttaaagaaatgaaattctcgctagggtgctatatatattgccatacagggtgcgtgaatatagccaaattggtcaggaccatctatcgtaatgaactaaagtccatcagggatggaaataaaatgtcatcggtgttgaatatatgcccattttctcaagttaagcttggcatgcatgtatacgatttagatttcctcgaagtccttgagcatccagtggccgtcggagcccctgaccatccacctgttctctggcacccaccagttcgccggcaccgggtactcgtccctgagcgcgtcggcgcccttgttcaccagcgccacgtcgcggtccacctccagcctgaaccctccggcggcgtaaacaaacctggtgacggcgtagcggcccgcggcggccacgcccacgccgggcagcaggtcggcgcggccgtacaggcacgcgccggcgtgcggcgaccgccgctctcggttgaagccgtcgtaggtggcctgcaccagctcgccgtaggagatgatggacctgcggaggtccatgtccagcgggtccaggaggccgttccacgagttgttgccctgcagctcgcgccacctggtggccgttgccgacgacgacggggggcccgccaccgcactgctcagcgacccaacacatga

SEQ ID NO: 238 - protein, 227 aa, Zea mays
MHQIRSSSLLKEMKFSLGCYIYCHTGCVNIAKLVRTIYRNELKSIRDGNKMSSVLNICPFSQVKLGMHVYDLDFLEVLEHPVAVGAPDHPPVLWHPPVRRHRVLVPERVGALVHQRHVAVHLQPEPSGGVNKPGDGVAARGGHAHAGQQVGAAVQARAGVRRPPLSVEAVVGGLHQLAVGDDGPAEVHVQRVQEAVPRVVALQLAPPGGRCRRRRGARHRTAQRPNT

SEQ ID NO: 239 - DNA, 756 bp, Zea mays
  CDS (1)..(756)
atgctgcaagggttgggagctagccatggggaggggtcgggtggagctcaagcggatcgagaacaagatcaaccgccagtcaccttcgccaagcgccgcaacggcctgctcaagaaggcgtacgagctctccgtgctctgcgacgccgaagtcgcgctcatcatcttctccaaccgcggcaagctctacgagttctgcagcggacagagcattaccaaaacacttgagaggtatgaaaaaaacagttatggaggaccagatactgctgtacagaacaaggagaacgagttagtccagagcagtcgtaatgagtacctcaagctgaaagcgagggtggataatttacagaggactcagaggaatttgcttggtgaagatctggggtcacttggtgtcaaagagcttgagcagcttgagaagcaacttgattcatccttaaggcacataagatccacaaggacacaacatatgcttgatcagctcactgatcttcagaggagggagcaaatgctgtgtgaagcaaataagtgccttagaagaaagctggaggagaccagcaaccaggtgcatggccaagtgtgggagcacggtgccaacttactcggctacgagaggcactcttctccacagcaggccccatcacatgttggcaatggtttgttctttcatcccctggaagctgcagcagagccaaccctgcagatcgggttcgctcccgagcatatgaataacttcatgccgacatggctaccctga

SEQ ID NO: 240 - protein, 251 aa, Zea mays
MLQGLGASHGEGSGGAQADREQDQPPVTFAKRRNGLLKKAYELSVLCDAEVALIIFSNRGKLYEFCSGQSITKTLERYEKNSYGGPDTAVQNKENELVQSSRNEYLKLKARVDNLQRTQRNLLGEDLGSLGVKELEQLEKQLDSSLRHIRSTRTQHMLDQLTDLQRREQMLCEANKCLRRKLEETSNQVHGQVWEHGANLLGYERHSSPQQAPSHVGNGLFFHPLEAAAEPTLQIGFAPEHMNNFMPTWLP

SEQ ID NO: 241 - DNA, 606 bp, Zea mays
  CDS (1)..(606)
atgcacgccacagtctcccttccctccccgtctcctccaaattcaatcgtctccaagcgccaatccgccccgtctccaaatcccaggcaggcaggcagccaaccagccatggagtgcgagccggaggagctgcacttcctgggcgtcgtcggcatctaccgcttctccgcggagatcctcctatgcccgcaccgcccgctcttcgcgcgcatcgcggccgccttcgcgctgcccctctccgcgctgttcctcctgcacgtcgccatctcgcacgcgctcttcacccacatcgactccgacgacacggccctggacgcatcctccccgggcaccgacacgcagcgccgcctgctgtcccgcctcgcctccgactggctcgccctgctcctcttcaagtccgcctacctcctcgcgctcctcctgctctcgctcctctccgtcgccgcctccgtgttctccgtcgcctccgtctactccgccaagcgcgacgcgctcaccttcccgcgcgtgctctccgtcgtgccccgcgtctggcggaggctcgccgccacgttcctcgccgccttcgcgctcctcttcgcctaccacgccgccgccgtgctctga

SEQ ID NO: 242 - protein, 201 aa, Zea mays
MHATVSLPSPSPPNSIVSKRQSAPSPNPRQAGSQPAMECEPEELHFLGVVGIYRFSAEILLCPHRPLFARIAAAFALPLSALFLLHVAISHALFTHIDSDDTALDASSPGTDTQRRLLSRLASDWLALLLFKSAYLLALLLLSLLSVAASVFSVASVYSAKRDALTFPRVLSVVPRVWRRLAATFLAAFALLFAYHAAAVL

SEQ ID NO: 243 - DNA, 1203 bp, Zea mays
  CDS (1)..(1203)
atgaaccttctcgagatgcagagcgccgcggctttccggccatgccccactcggctgctggtgagcagcccttgtcgccccctcctctcggcccgcccgcttcgtgcctccgccgctggcgccgtcgctaccagaagcagcgccgtgggccctcgcggtctggggctcgggctgctgccagcctcgcccgatcgggatggcaagtgccgccagcgacaggtgtcatgcagcgcggccggggatgctgtggcggccccgaaggcggaagaaggaggcgggctcatgaagacgctgtggctcggctcgctcttcggcctctggtacctgttcaacatctacttcaacatctataacaagcaggtactcaaggttttcccataccctataaacatcacagaagttcaatttgctgtcggaactgtagcagctctgttcatgtggatcactggtattattaagaggccaaagatttctggagcacagcttgtagccatcctacctctggctattgttcatactatgggcaatctcttcaccaacatgagccttgggaaagttgcagtgtcatttacgcacaccatcaaggctatggagcctttcttttctgttattctttctgcaattttccttggcgagctacctactatttgggtagtatcttctcttcttccaattgttggtggtgttgcattggcatctcttactgaggcatcctttaactgggctggcttttggagtgcaatggcttcaaatgttacctttcaatcccgaaatgtattgagcaagaagctcatggttaagaaagaggaatccttggacaaccttaatctcttctctatcattacagtgatgtcatttttccttttggcccctgttaccttctttacagaaggtgtcaaaattactcctacatttttgcaatctgctggtctgaatgtaaaccaagtccttacaaggtgtcttttcgctggactgtgtttccatgcataccaacaggtgtcttacatgattttggcgatggtgtctcctgtcactcattctgtgggcaactgtgttaaacgtgttgtggtcattgtaacatcagtgctgttcttcaggacacctgtttctcctatcaactctctcggtactgcgattgcacttgccggagttttcctgtactcacagctcaagcgacttaagcccaagccgaagacggcttga

SEQ ID NO: 244 - protein, 400 aa, Zea mays
MNLLEMQSAAAFRPCPTRLLVSSPCRPLLSARPLRASAAGAVATRSSAVGPRGLGLGLLPASPDRDGKCRQRQVSCSAAGDAVAAPKAEEGGGLMKTLWLGSLFGLWYLFNIYFNIYNKQVLKVFPYPINITEVQFAVGTVAALFMWITGIIKRPKISGAQLVAILPLAIVHTMGNLFTNMSLGKVAVSFTHTIKAMEPFFSVILSAIFLGELPTIWVVSSLLPIVGGVALASLTEASFNWAGFWSAMASNVTFQSRNVLSKKLMVKKEESLDNLNLFSIITVMSFFLLAPVTFFTEGVKITPTFLQSAGLNVNQVLTRCLFAGLCFHAYQQVSYMILAMVSPVTHSVGNCVKRVVVIVTSVLFFRTPVSPINSLGTAIALAGVFLYSQLKRLKPKPKTA

SEQ ID NO: 245 - DNA, 1278 bp, Zea mays
  CDS (1)..(1278)
atgacgagggggagcacccatcagccaagagctatccatacgcacagcgatgcaccagcacgagagatactagccatcatgcgcctgtcgtccctcctcctcgtcgtggccgccctctcggcgcgcgccgcggcgcagcaggtgccgccggtgggcggcagcgctctgaagccggactactacagccagtcgtgcccgcgcgcggagcggatcatcgcggaggtgatgcagacgaagcagatggcgaacccgacgacggccgcgggcatgctgcgcgtcttcttccacgactgcttcgtcaccgggtgcgacgcgtcggtgctgatcgcgtccacccagttccagaagtcggagcacgacgcggagatcaaccactcgctccccggggacgccttcgacgccgtggtgcgcgccaagctggccctggagctggagtgccccggggtggtgtcctgcgccgacatcctcgcgctggcgtcgggggtgctggtcaccatgaccggcgggccccggtacccgatcccgctggggcgcagggactcgctgtcgtcgtcgcccacggcgcccgacgtcgagttgccgcacgccaacttcaccgtggaccgcctcatccagatgttcggcgccaaggggttcacggtgcaggagctggtggcgctgtccggcgcccacacgctgggcttctcccactgcaaggagttcgccgaccgcctctacaacttccgcaaccagggcgggaagccggagcagttcgaccccagcatgaacccgtcctacgccagggggctgcaggacgtgtgcagggactacctcaaggaccccaccatcgccgcgttcaacgacatcatgacgcccggcaagttcgacaacatgtacttcgtcaacctcgagcgcggcctcggctgctcagcaccgacgaggagctgtggacggacccacgcaccaagcccctggtgcagctctatgcatccaacgccacagccttcttcgacgacttcggccgcgccatggagaagctcagcttgttcggcgtcaagaccggcgccgacggcgaggtcaggcggcgctgcgacgcctacaacagcggccccgacgttggcggcgccatgcctatggctatgcccatgcccaagatgtgacgctgcgcgtgctataagtacaacgacggcggccgcacgcgtgcttgtctgccgatcgatcgacggccgagttgtgtggcagtggcacgatgacccctgctgctcctatagtcctatacggcggtcacgatggtgttga

SEQ ID NO: 246 - protein, 425 aa, Zea mays
MTRGSTHQPRAIHTHSDAPAREILAIMRLSSLLLVVAALSARAAAQQVPPVGGSALKPDYYSQSCPRAERIIAEVMQTKQMANPTTAAGMLRVFFHDCFVTGCDASVLIASTQFQKSEHDAEINHSLPGDAFDAVVRAKLALELECPGVVSCADILALASGVLVTMTGGPRYPIPLGRRDSLSSSPTAPDVELPHANFTVDRLIQMFGAKGFTVQELVALSGAHTLGFSHCKEFADRLYNFRNQGGKPEQFDPSMNPSYARGLQDVCRDYLKDPTIAAFNDIMTPGKFDNMYFVNLERGLGCSAPTRSCGRTHAPSPWCSSMHPTPQPSSTTSAAPWRSSACSASRPAPTARSGGAATPTTAAPTLAAPCLWLCPCPRCDAARAISTTTAAARVLVCRSIDGRVVWQWHDDPCCSYSPIRRSRWC

SEQ ID NO: 247 - DNA, 714 bp, Zea mays
  CDS (1)..(714)
atgccgtttcgggaagccgtgaagggatcggccacgacgatggtgcgggggaagacggagctgaagcggatagagaacgcgacgagccggcaggtgaccttctcgaagcgccgcaacgggctgctcaagaaggccttcgagctctccgtgctctgcgatgctgaggtcgggctcgtcgtcttctccccgcgcggcaagctctacgagttcgccagcgccgccagcctccagaaaacaattgaccgctacaggacatacacaagggaaaatgtcaataacaagactgttcaacaagatatacagcaagtcaaagcagatgccgtaagcttggcaagtagactcgaagccctagaaaagaccaaacgaatgtttctgggtgaaaatttagaagaatgctccattgaagaactgcacaatctggaggttaaactggcgaagagccttcacgtcatcagagggaagaagacacaactgctggagcagcagatatccaagctgaaggagaaggagaggaccctgctccaagacaacaaagagttgcgggataagcagcgcaacctccagtctccaccggaggcgccaccggacctgaaccgctgtgtccctccttggccgcgtagcctgccggcaccgagcaatgacatggacgtggagacggagctgtacataggattacccggcagggagcgctcctccaaccgggactctgattga

SEQ ID NO: 248 - protein, 237 aa, Zea mays
MPFREAVKGSATTMVRGKTELKRIENATSRQVTFSKRRNGLLKKAFELSVLCDAEVGLVVFSPRGKLYEFASAASLQKTIDRYRTYTRENVNNKTVQQDIQQVKADAVSLASRLEALEKTKRMFLGENLEECSIEELHNLEVKLAKSLHVIRGKKTQLLEQQISKLKEKERTLLQDNKELRDKQRNLQSPPEAPPDLNRCVPPWPRSLPAPSNDMDVETELYIGLPGRERSSNRDSD

SEQ ID NO: 249 - DNA, 849 bp, Zea mays
  CDS (1)..(849)
atgccttcgttgatcgccgtctcaggtcatggcagggcggcgccggatcgggccgccctgactgtggggccgggcatggacatgccaatcatgcacgacagcgaccggtacgagctcgtgcgcgacatcggctccggcaacttcggcgttgcccgcctcatgcgcgaccgccgcaccagcgaactcgtcgccgtcaagtacatcgagcgcggcgagaagatagatgagaatgtccagcgtgagataattaaccatagatcattgaagcaccctaacattattaggtttaaagaggttattttaacaccgacccatcttgctattgtcatggaatatgcctctggcggtgagctttttgagaggatatgtaagaacgtgcgattcagtgaagatgaggctcgctacttcttccagcagcttatttcaggagtaagctactgccattcaatgcaagtatgccaccgtgatttgaagttggagaacacacttctagatgggagtgatgctcctcgcttgaagatatgtgacttcggttattccaagtcatctgttcttcattcccaaccgaagtcaactgttggaacacctgcttatattgcacctgaagttctgttgaaaaaagaatatgatggcaagattgctgacgtttggtcatgtggtgtaaccctctatgtaatggttgttggcgcatatccttttgaagatccagaagagcctaagaacttccgcaagacaattcagcgtatcttgaatgttcagtacgcaattccagacaacgtgaacatatctccagagtgcaggcatctaatttcgaggatttttttgttggcgatcctgctacgcgaatga

SEQ ID NO: 250 - protein, 282 aa, Zea mays
MPSLIAVSGHGRAAPDRAALTVGPGMDMPIMHDSDRYELVRDIGSGNFGVARLMRDRRTSELVAVKYIERGEKIDENVQREIINHRSLKHPNIIRFKEVILTPTHLAIVMEYASGGELFERICKNVRFSEDEARYFFQQLISGVSYCHSMQVCHRDLKLENTLLDGSDAPRLKICDFGYSKSSVLHSQPKSTVGTPAYIAPEVLLKKEYDGKIADVWSCGVTLYVMVVGAYPFEDPEEPKNFRKTIQRILNVQYAIPDNVNISPECRHLISRIFLLAILLRE

SEQ ID NO: 251 - DNA, 1557 bp, Zea mays
  CDS (1)..(1557)
atggccgccatcacgccgccgacgcagtcggagccgtcgccgcagacggggcgcccggcctcgtctgccgccgccgcggccaagcgtggagggggcggggctggtgccgccggcgggccgctgatggggaagtacgagctggggcgcctcctggggcacggcaccttcgcgaaggtgtaccacgcgcggcacgtcgacacgggggacaacgttgccatcaaggtgctcgacaaggagaaggccgtgaagagcgggctcgtcccgcacatcaagcgcgagatcgctgtgctacgccgcgtgcgccacccgaacatcgtgcacctgttcgaggttatggccacaaagactaagatctacttcgtcatggagctcgtccgcggcggcgagctcttctcccgcgtctccaagggccgactcagggaggacaccgcgcgccgctacttccagcagctcgtctccgccgtggggttctgccacgcccgcggcgtcttccaccgcgacctgaagcccgagaatctactcgtcgacgagcaggggaacctcaaggtatcggattttgggctctccgccgtcgccgagcagttccgtcccgacggcctgctccacaccttctgcggcaccgcggcctatgtggcccccgaagtgctcggccgccgcgggtacgacggcgccaaggcagacgtgtggtcgtgcggtgtcatcctctttgtgctcatggccggatatctccctttccatgacaaaaacatcatggccatgtacaagaagatttacaagggcgagttccgctgtgcgaggtggttctccaaagaccttaccagcttgctgatgcgcattcttcacactaatcccaacactcggatcactttgccggagatcatggagtcccgctggttcaagaaaggattcaagcctgtcaagttctatatcgaggatgaccagctgcataacgttatagatgacgaagatggcctgttagatatgggacctgctggtcctgttcctccaccattgccacctccaccgccacctctacctccaccaaaggttgatggtgatgaatcagggtctgactcagactcgtcgatctcatcctgccctgcttcaatgttatctgatgagagccaaaggccccgtggctctctaccacgtccagcaagtcttaatgcctttgatatcatatcattttcaaggggatttaacttatcagggttatttgaggagaaaggggatgaagtgaggttcatctcggctgagcccatgtcagatatcataaccaaattggaggacatagcgaagctgaagagcttcaagttgcggaggaaggactggcgcatctgcctggagggtacaagggaaggagttaaggggccattaacaattggcgcggagatatttgaactcacacctccccttgtaatggtggaggtaaaaaagaaggcaggggataatgaagagtacgagaacttctgtgacaaggaattgaagccagggatgcagcaccttgtccaccatatggtccgagctccaagtatgctgcttactgatgccaagtga

SEQ ID NO: 252 - protein, 518 aa, Zea mays
MAAITPPTQSEPSPQTGRPASSAAAAAKRGGGGAGAAGGPLMGKYELGRLLGHGTFAKVYHARHVDTGDNVAIKVLDKEKAVKSGLVPHIKREIAVLRRVRHPNIVHLFEVMATKTKIYFVMELVRGGELFSRVSKGRLREDTARRYFQQLVSAVGFCHARGVFHRDLKPENLLVDEQGNLKVSDFGLSAVAEQFRPDGLLHTFCGTAAYVAPEVLGRRGYDGAKADVWSCGVILFVLMAGYLPFHDKNIMAMYKKIYKGEFRCARWFSKDLTSLLMRILHTNPNTRITLPEIMESRWFKKGFKPVKFYIEDDQLHNVIDDEDGLLDMGPAGPVPPPLPPPPPPLPPPKVDGDESGSDSDSSISSCPASMLSDESQRPRGSLPRPASLNAFDIISFSRGFNLSGLFEEKGDEVRFISAEPMSDIITKLEDIAKLKSFKLRRKDWRICLEGTREGVKGPLTIGAEIFELTPPLVMVEVKKKAGDNEEYENFCDKELKPGMQHLVHHMVRAPSMLLTDAK

SEQ ID NO: 253 - DNA, 981 bp, Zea mays
  CDS (1)..(981)
atggaaggacggtgctggcggcgctgctggtggccgccgccctcgccggcgggcgcgggcgcagctcaaggaggggttctacgactactcctgcccacaggcggagaagatcgtcaaggactacgtgaaggcgcacatcccccacgcgcccgacgtcgcctccaccctgctccgcacccacttccacgactgcttcgtcaggggctgcgacgcgtcagtgctgctcaacgcgacgggcggcagcgaggcggagaaggacgcggcgcccaacctgacgctgcgcgcttcggcttcatcgaccgcatcaaggcgctgctcgagaaggagtgccccggcgtggtgtcctgcgccgacatcgtcgcgctcgccgcccgcgactccgtcggcgtcatcggcggtccgttctggagcgtgccgacggggaggcgcgacggcaccgtgtccatcaagcaggaggcgctggaccagatccccgcgcccaccatgaacttcacccaactcctccagtccttccagaacaagagcctcaacctcgccgacctcgtctggctctcaggggctcacacgatcggcatctcccaatgcaactccttcagcgagcgcctgtacaacttcacggggcgcggcgggcccgacgacgcggacccgtcgctggacccgctgtacgccgcgaagttgcggctcaagtgcaagacgctgacggacaacacgacgatcgtggagatggaccccggcagcttccgcaccttcgacctgagctactaccgcggcgtgctcaagcggcggggcctgttccagtccgacgccgcgctcatcaccgacgccgcctccaaggccgacatcctcagcgtgatcaacgcgccgcccgaggtgttcttccaggtcttcgcgggctccatggtcaagatgggcgccatcgaggtcaagaccggctccgagggcgagatcaggaagcactgcgccctcgtcaacaagcactga

SEQ ID NO: 254 - protein, 326 aa, Zea mays
MEGRCWRRCWWPPPSPAGAGAAQGGVLRLLLPTGGEDRQGLREGAHPPRARRRLHPAPHPLPRLLRQGLRRVSAAQRDGRQRGGEGRGAQPDAARFGFIDRIKALLEKECPGVVSCADIVALAARDSVGVIGGPFWSVPTGRRDGTVSIKQEALDQIPAPTMNFTQLLQSFQNKSLNLADLVWLSGAHTIGISQCNSFSERLYNFTGRGGPDDADPSLDPLYAAKLRLKCKTLTDNTTIVEMDPGSFRTFDLSYYRGVLKRRGLFQSDAALITDAASKADILSVINAPPEVFFQVFAGSMVKMGAIEVKTGSEGEIRKHCALVNKH

SEQ ID NO: 255 - DNA, 546 bp, Zea mays
  CDS (1)..(546)
atgtacatcatctactggtctggtagtcatcagcaaacctcctcggggatgctctgcaggccgggctcccactccccgcccgcctgcatccgccgcgcggcagcctcggccgcccgccgcacgctgcgccgccgcagcgactgcagcctctgctcggcgcccggccctgccgctgccgccgcgcgctgccggtggcgctcgctgctggccgcggccaccagaccgccgtcgccgagcgccgcgaccatctgcttgagctcgcgcttgctgacgacgatcttgacgcgcaccgcgcccccgacgtcctccctggacaggaggcgcccgccgtggtgcagccgctcgagggcctgggccgccgccgccttggactgcgggtggtcggcggcggcagcgtccctggggaagaagcacctggacgccatcgggagcgccggccggccggtgggcgaggaggagtctgtgatgtgcgcctgcctgcctgcccggccctctcgccgacgttccttgcaagtcacagcacgaaggcaaaagccaaggccatga

SEQ ID NO: 256 - protein, 181 aa, Zea mays
MYIIYWSGSHQQTSSGMLCRPGSHSPPACIRRAAASAARRTLRRRSDCSLCSAPGPAAAAARCRWRSLLAAATRPPSPSAATICLSSRLLTTILTRTAPPTSSLDRRRPPWCSRSRAWAAAALDCGWSAAAASLGKKHLDAIGSAGRPVGEEESVMCACLPARPSRRRSLQVTARRQKPRP

SEQ ID NO: 257 - DNA, 438 bp, Zea mays
  CDS (1)..(438)
  misc_feature (4)..(435): n at positions 4, 5, 390 and 435 is a or g or c or t/u
atgnngctgaagcggatcgagaacaagatcaaccgccaggtcaccttcgccaagcgccgcaacggcctgctcaagaaggcgtacgagctctccgtgctctgcgacgccgaagtcgcgctcatcatcttctccaaccgcggcaagctctacgagttctgcagcggacagagcattaccaaaacacttgagaggtatgaaaaaaacagttatggaggaccagatactgctgtacagaacaaggagaacgagttagtccagagcagtcgtaatgagtacctcaagctgaaagcgagggtggataatttacagaggactcagaggaatttgcttggtgaagatctggggtcacttggtgtcaaagagcttgagcagcttgagaagcaacttganttcatccttaaggcacataagatccacaaggacacaacatatgcntga

SEQ ID NO: 258 - protein, 145 aa, Zea mays
  misc_feature (2)..(2): Xaa can be any amino acid
  misc_feature (130)..(130): Xaa can be Asp or Glu
MXLKRIENKINRQVTFAKRRNGLLKKAYELSVLCDAEVALIIFSNRGKLYEFCSGQSITKTLERYEKNSYGGPDTAVQNKENELVQSSRNEYLKLKARVDNLQRTQRNLLGEDLGSLGVKELEQLEKQLXFILKAHKIHKDTTYA

SEQ ID NO: 259 - DNA, 4590 bp, Zea mays
  CDS (1)..(4590)
atgggaactccagttggtatcatcgttggttctcatgtttgggtggaagacccaaatctagcttggatagatggagaagttattagcataaaaaacaatgaagtacatgtgcagacatcgaatgggaaaaaggttaccacagacaggtcaaaagtatttcccaaggatatggaagctccaccaggaggagttgatgatatgacaagactttcatacttacatgaacctggtgttctacagaatcttgctacccgctatgaactgaatgaaatatatacttacacaggcagcattttgattgctgtaaatccatttcaaagattgccacatctttatgatacccacatgatggaacagtacaagggtgcagattttggggaattgagtccccatgactttgctatcgcagatgttgcttacagggcaatggataatgaagggaaaagcaactctatattggtcagtggtgaaagtggtgctgggaagactgagacaacgaagatgcttatgagatatttagcacatttaggtgggcgatctggagtagaaggacgtacagtggaacaacaagttttagagtccaacccagttcttgaagcttttggtaatgctaaaactgtgcgaaataacaactcaagtcgctttggcaagtttgttgagatccaatttgacaagactggacggatctcaggagctgctatcagaacttacttgctggaaagatcacgtgtgtgccaaattaattctccagaaagaaattaccattgcttttattttctttgtgccgcaccacctgagtacactcagaggtacaagctgtctgatcctagatctttccattacctcaatcagtcgagctgtattgaggtggatggaatcaatgatgctgaagagtatttagcaacacgaagagctatggatatagttggaatcaatgaggaagagcaggaaggtatattccgggttgtagctgctgtacttcatcttggaaatataaattttgccaagggaacagaaatcgattcttctgtaatcaaggatgataaatccaggttccaccttaatatcgcagcagaacttttgaaatgtgattgccagaatttagagaaggcgctgataacacgagttatagtcacgcctgaagaagttatcactagaacacttgatcctgcttctgcagttgctagcagagacgcattagctaaaataatatactcccgattgtttgattggattgtggaaaaaattaatgtctcaattggacaggacccaaactcaaaacagttaattggagttcttgatatctatggttttgagagcttcaaagttaacagttttgaacagctatgtatcaattatacaaatgaaaagctgcaacaacattttaaccagcacgtgttcaaaatggaacaagaagagtataccagagaagagataaactggagttacatcgagtttgttgataatcaagatgtgctagacttgatagagaagaaaggtggattgattgcacttctggatgaagcatgtatgtttcctagatctacacatgagacgtttgcgcagaagctatatacaacatttaagaataacaagcggtttgccaagccaaagctttcacgcactgattttacagtagtccattatgctggcgatgtgacataccaggctgattatttcttagacaagaacaaagattatgtagtggctgaacatcaggatctgctgaatgcttcttcatgcctattcgtagctggtttattccctcctctcccacaggagacagcaaagtcttcaaaattttcatccattggatcacgttttaagcttcaacttcaatccctcatggaaactttgagctctaccgaaccccactatattagatgtgtgaagccaaataatctccttaagccagctatttttgagaatacaaatgttatacaacaactaagatgtggaggtgttctcgaagctatcaggatcagctgtgctggatatcccacaagaaaaacattttatgaatttgtcaatcgttttggtgtccttgctcctgaagttttagaagggagcaatgatgataagattgcgtgccaaaagattttggaaaaaatgggtctggagaattaccagattggaaaaacaaaggtgtttctaagagctggacagatggctgatttggatgctcgtagagctgaagtattaggaagagcagcaagaatcatacagaggcaaatacgtacatatattgcaaggaaacagtttgctgagcttaaaagatcagcaacacagctgcaatcttttgtcagaggaaccttggctcgtaagttgtatgagtgcatgaggcaggaagcagcagcagtgaaaatacaaaagaatatgcgacgccacaaagcacgggaatcttatttacaattgcaagcagctgcaatcacattgcagacaggtttaagggcaatgtctgctcgcaaagaattcaggttcagaaaggaaacaaaagctgctgtccacatccaagctcaatggcgccgccacagagactactcacattacaagaatctgcaaggagcagctcttacttaccagtgtgcctggaggcaaaggcttgccagaagggagctcaggaagctcaagatggcggcaagagaaacaggagccctaaaagaggccaaggataaacttgagaagcgtgttgaagaactcacctggcgcttaggattggagaagcgattaaggactgaccttgaggaagcaaaagcccaggaaattgctaagctgcaagagacgttgcatgatatgcagcttcaagttgaagagtcaaaggccatggtagttaaggagagggaagctgctagaaaggcaattgaagaagcacctccagtaattaaagagactcctgtgctagtcgaagacacagaaaagattaactcactgacgaccgaagttgaacaactgaaggctttgctgctaactgaaagacaagcaacagaagctgcaaaaagagaacacgctgaatctgaactgagaaatgaagaactaattaagaaatttgagagcgcagagaaaaagattgagcaacttcaggaaactgtccataggctggaggagaaagcaaccaacatggagtctgagaacaaagtgctccgtcaacaagctgttgcaatttctcctacgtcaaaatcattagctgcatatcctaagtctcctttccagctgaaaactccggagaatgggaatgctctaaatggagaagtgaagtcatcaccagatatcacccctatcttaccaaaccccaaggagcttgaggctgaagagaagccacaaaaatcacttaatgaaaagcagcaggaaaatcaagacctactgatcaagtgtgtatcacaagatctgggattctccagtggcaaacctattgcagcttgccttatctacaggtgtcttctacactggagatcattcgaagttgaaagaactggtgtttttgaccgtattattcaaacaattggctctgctattgagtcccaggacaacaatgacaagttggcatattggctctcgaattcatccacactgctgctgctgctgcaacgaacactgaaaacaactggagcagctggattcactcctcaaaggcgcaggtcatctgctgcatcttttgggagggtgttttcggggatgcgagcctcaccacaaagtgctgggcgtgcttttatgggaagtcgcttgattggaggtctaggtgaccttcgtcaagttgaagccaagtaccctgccctgcttttcaagcaacagctcacagctttccttgagaagatctatggaatgataagagacaatttgaaaaaggagatatctcctttgcttggcctttgcatccaggcaccaagaacatcccgtgcaagcctaattaaagggtcacgttcccaagcaaatgccttagctcagcaaactctgattgcacattggcagagcattgtgaaaatattgacaaattacttgaatgttttaaaagcaaattatgtcccttcagtcttaatcagcaaagtgttcactcaaatcttttcatttattaatgttcagttatttaatagtcttcttcttcgacgggagtgctgttcatttagcaacggagaatatgtgaaagctggattggcagaattagagcagtggtgcatttatgcaacagaagagtatgcaggttcttcctgggaagaattaaaacatattaggcaggctgttggattccttgtgattcatcaaaagccaaagaaaacattgaaagaaattaccaacgatctgtgccctgtccttagcatacaacagctatatcgaatcagtacaatgtactgggatgataagtacggtacccacactgtttcatcagatgtcatctcaagtatgagagtaatgatgacagaagattctaataacgcggtcagcagttcgttcctgttggatgatgattccagcattccgttttcggtggacgacatctcgaagtcgatgacagaaatcgaggtaacagatgtcgacatgccacctctgatccgggagaattctggcttcaccttcctacaccaaagaaaggactga

SEQ ID NO: 260 - protein, 1529 aa, Zea mays; identical to SEQ ID NO: 130

SEQ ID NO: 261 - DNA, 1692 bp, Zea mays
  CDS (1)..(1692)
atggctccacttctcgccgcagccatgaaccacgctgcccatccagtccttagaagccatctaggacccaacaatgagagtttctcacgacaccacctatcttcttcaccgcaaagcagtaagcgaaggtttaaccttagctttacgccacgatctgcaagagtaggcaatcaaaatggagtccaattgttgagcccttcggaaatccctcgaagggactggttcccctccgacttcatctttggtgccgccacttcagcgtaccaaattgaaggtgcttggaacgaagatggaaagggggaaagcaattgggatcacttctgccacaattttccggaaaggataatggacgggagcaatgcagacattggagcgaattcgtaccatatgtacaaaacggatgtcagattgctgaaggaaatgggcatggacgcatataggttctctatctcttggcctagaatactgcctaagggaacggtcgaaggaggtattaaccaggatggcatcgattactacaaaaggctcatcaacttgttgctagagaatggcatagagccatatgtaacaattttccactgggatgtccctcaagcactagaagagaagtacggcggattcttagataagactcataagaggattgtaaatgattacaaaaacttcgctaaggtgtgcttcgacaactttggtgacaaggtgaagaattggttgacctttaatgagccccagacatttacttcattttcctatggaaccggggtctttgccccaggacgatgctcaccgggactagactgtgccatcccaactgggaattcactcgtcgaaccttacattgctggccacaacattcttctagcccacgctgaggctgttgatctttacaacaagtattacaagggcgagaacggccgcataggtcttgcatttgatgtaatgggtcgtgtgccatacggaacatcatttctagatgaacaggccaaagaaaggtccatggacattaacctaggatggttcttggagcctgtggttcgtggtgactaccccttctcaatgagatcgttagcgagggaacgactacccttcttcagtgacaaacagcaagagaagcttgtgggatcctataacatgttgggaataaactactacacctcaatattctccaaacatatcgacatctcaccaaaatactcgcctgttctcaacactgacgacgcctacgctagtcaagaaacgtatgggcctgacgggaaacccattggtcctcctatgggaaatccgtggatctacttatacccagaaggcctaaaggatatccttatgatcatgaagaacaaatatggaaacccacctatctacatcactgagaacggaatcggggatgttgatacaaaggagaaacctctacccatggaggctgccttaaatgactacaaaaggctagattacatccagcgccacatctcaactctcaaggagtcaatagacttgggagcaaatgtgcatggctacttcgcttggtctctgctggataactttgaatggtacgccggctacaccgaacgttatggcattgtctacgtcgaccgcaaaaataactacacgcgctacatgaaggagtcagccaagtggttaaaagagttcaatactgcgaagaagcctagcaagaagattattacgccagcttga

SEQ ID NO: 262 - protein, 563 aa, Zea mays
MAPLLAAAMNHAAHPVLRSHLGPNNESFSRHHLSSSPQSSKRRFNLSFTPRSARVGNQNGVQLLSPSEIPRRDWFPSDFIFGAATSAYQIEGAWNEDGKGESNWDHFCHNFPERIMDGSNADIGANSYHMYKTDVRLLKEMGMDAYRFSISWPRILPKGTVEGGINQDGIDYYKRLINLLLENGIEPYVTIFHWDVPQALEEKYGGFLDKTHKRIVNDYKNFAKVCFDNFGDKVKNWLTFNEPQTFTSFSYGTGVFAPGRCSPGLDCAIPTGNSLVEPYIAGHNILLAHAEAVDLYNKYYKGENGRIGLAFDVMGRVPYGTSFLDEQAKERSMDINLGWFLEPVVRGDYPFSMRSLARERLPFFSDKQQEKLVGSYNMLGINYYTSIFSKHIDISPKYSPVLNTDDAYASQETYGPDGKPIGPPMGNPWIYLYPEGLKDILMIMKNKYGNPPIYITENGIGDVDTKEKPLPMEAALNDYKRLDYIQRHISTLKESIDLGANVHGYFAWSLLDNFEWYAGYTERYGIVYVDRKNNYTRYMKESAKWLKEFNTAKKPSKKIITPA

SEQ ID NO: 263 - DNA, 633 bp, Zea mays
  CDS (1)..(633)
atggagaagcaatccagcacccggcatggtgccctagagaaattgaagagcttccgggggatagagaagcagagaagcttcaagttcttgtccatggagaagcagcagagcttcaaaaggaacaaggacagccctgggaagcggggtgacaccgcactccacctcgcggcgagagctggcagtgtcgcacatgttcagaagatccttgcggagtgtgatccagaactggtggtggagttagctggccgcacgaatcaagacggcgagactgcgttgtatgtgtctgctgagaaagggcatgttgaggttgtgtgtgagattttgaaggcttcggatgtgcagtcagccgggatcaaggccagtaacagcttcgatgcattccatattgcggcaaagcagggccatttggatgtcttgaaggagctgttacaggcctttccctcattagcaatgacaacaaattctgtaaatgccacagctttggacactgctgcaactcagggccacgttgacattgttaatcttctgctagaaacagatgcaagccttgctaggattgcaagaaataatggcaagacagttttgcattcagcagcaagaatgggccatgtggaggtggtcactgcactgtga

SEQ ID NO: 264 - protein, 210 aa, Zea mays
MEKQSSTRHGALEKLKSFRGIEKQRSFKFLSMEKQQSFKRNKDSPGKRGDTALHLAARAGSVAHVQKILAECDPELVVELAGRTNQDGETALYVSAEKGHVEVVCEILKASDVQSAGIKASNSFDAFHIAAKQGHLDVLKELLQAFPSLAMTTNSVNATALDTAATQGHVDIVNLLLETDASLARIARNNGKTVLHSAARMGHVEVVTAL

SEQ ID NO: 265 - DNA, 1263 bp, Zea mays
  CDS (1)..(1263)
atgcacgaggccagagtccaaaaccctacgatccgcgccaccatgccgcgcctcgccgccgccgccgccgtctcacgccgcgccggcgaggccctgcgccgcggcgcgtttgggggactgcggcctctctcctccctgcaaccgttaaacgccgcctccagcgacgaggtgctcgttgaaggaaagacaagtgcgcgcgctgccgtgctcaaccgccctggctacctcaacgccctcaccaccaccatgggagctaggctcaataaattttatcaatcatgggaggacaacccagacattggctttgtcatgatgaagggcagcggccgagcattctgtgctggtggggatgttgttagattacatgaacttatcagtgaaggcaagctggaggaatgtaaggattttttcaagactttgtacatgttcatttattttctgggcacgtacttgaaaccacatgttgccattcttgatggcattactatgggtggtggtggaggtgtttccatccctggaacattccgtgttgcaactgataggacagtctttgcaactccagaagttcatattggattccatcctgatgctgcagcctccttttatttgtcgcatctaactggccatgttggggaatatgtggccttgactggtgaaaagcttaatggaacagatatgattgctcttggccttgctacacactatttcatgagtggccatctggatctgatcgatgaacgacttgcaaagttagtaactgatgatccatcagttattgattcgtcccttgcacaatatggagacatggtttatccggacaaaaaaagcattgttcataggctggaggtgattgataaatgcttcagccatgacacagttgaagagattgttgatgccttggaaagtgaagcagccagctcaaatgaagaatggtgtatcttggcgctgaaacgattgaaagaggcctctccgttagctttgaaggtctcactgcgatcgatacgcgagggtagatatcagacacttgatgagtgccttgtccgtgagtaccgcatgtccatgaatggaatctcaaagcaattttctcatgaattctgcgagggagtcagagcacgactagtcgacaaggacttcactcctaagtgggatcctcctgcccttgagtatgttacgaatgacatggttgacgcatacttcgcacctcttggcgattcggagcctgagttgaagctgcctatagaatcgcgagaggcatttgtatga

SEQ ID NO: 266 - protein, 420 aa, Zea mays
MHEARVQNPTIRATMPRLAAAAAVSRRAGEALRRGAFGGLRPLSSLQPLNAASSDEVLVEGKTSARAAVLNRPGYLNALTTTMGARLNKFYQSWEDNPDIGFVMMKGSGRAFCAGGDVVRLHELISEGKLEECKDFFKTLYMFIYFLGTYLKPHVAILDGITMGGGGGVSIPGTFRVATDRTVFATPEVHIGFHPDAAASFYLSHLTGHVGEYVALTGEKLNGTDMIALGLATHYFMSGHLDLIDERLAKLVTDDPSVIDSSLAQYGDMVYPDKKSIVHRLEVIDKCFSHDTVEEIVDALESEAASSNEEWCILALKRLKEASPLALKVSLRSIREGRYQTLDECLVREYRMSMNGISKQFSHEFCEGVRARLVDKDFTPKWDPPALEYVTNDMVDAYFAPLGDSEPELKLPIESREAFV

SEQ ID NO: 267 - DNA, 1002 bp, Zea mays; identical to SEQ ID NO: 119
  CDS (1)..(1002)

SEQ ID NO: 268 - protein, 333 aa, Zea mays; identical to SEQ ID NO: 120

SEQ ID NO: 269 - DNA, 744 bp, Zea mays
  CDS (1)..(744)
atggctcgcgcccacttccgctgccgtgctcaagacccgttcctcggggccaggcgcgcgctcgccaatgccgccgccaagcccggccctcgccgcgcgctggtcgtcgccgccgcggccgccgccaagaagtcgtggatcccggccatcaagagcgacgccgagatcgtgaacccgccctggctcgacggctcgctccccggcgacttcgggttcgacccgctggggctgggcaaggacccggcgttcctcaagtggtaccgggaggcggacgtgatccacgggcggtgggcgatggcggccgtgctgggcatcttcgtggggcaggcgtggagcggcatcccgtggttcgaggccggcgcggacccgacgcgcatcgcgcccttctccttcgggtcgctgctgggcacgcagctgctgctgatggggtgggtggagtcgaagcggtgggtggacttcttcaacccggactcccaggccgtggagtgggccacgccatggtcccgcaccgccgagaacttcgctaacttcaccggcgagcagggctacccgggcggcaagttcttcgacccgctcgcgctcgccggcacgtcaagggacggcgtctacatccccgacgtcgacaagctcgagcggctcaagctggccgagatcaagcacgcccgcatcgccatgcttgccatgctcgccttctacttcgaggctgggcagggcaagacgcgcctcggcgcgctcggcctatga

SEQ ID NO: 270 - protein, 247 aa, Zea mays
MARAHFRCRAQDPFLGARRALANAAAKPGPRRALVVAAAAAAKKSWIPAIKSDAEIVNPPWLDGSLPGDFGFDPLGLGKDPAFLKWYREADVIHGRWAMAAVLGIFVGQAWSGIPWFEAGADPTRIAPFSFGSLLGTQLLLMGWVESKRWVDFFNPDSQAVEWATPWSRTAENFANFTGEQGYPGGKFFDPLALAGTSRDGVYIPDVDKLERLKLAEIKHARIAMLAMLAFYFEAGQGKTRLGALGL

SEQ ID NO: 271 - DNA, 618 bp, Zea mays
  CDS (1)..(618)
atggtgcggaaatgcttgcctgtggcctggcaatctcattttgtcccgtcaaagaggttgccattgcttgaggaatcgcttaaaaagctggacacgtccagtacttttgctgtgtcgggtattatcgaccagttttcacagaggccattagtgaaagatagcagctctttaaataggatggaaaccatcaacaaatgcttctccaaaaggacagttgaagaaatcatagatgctcttgaacaagaaatctcaaatgtttcagacaaatgggttgctgcaacaatcaagtccctgaaaaaggcttcccccaccagcctaaaaatttctctgagatcgataagagaagggagaacacaaactcttggggagtgcctgcgtcgggaatatagagtggtttgccatgtcctgcgtggcaccttcagccgagacttgtctgagggatttagggctgtgctactagaaaaagacaacaagccagagtggattcctccaaggttggaacaagttcctgacgaggcagttgagcaatatttcttgagaattgatgatccccagtgggaagatctgaacctgcctgcgagacttccccaccgaagaaatattgagtccaagatttga

SEQ ID NO: 272 - protein, 205 aa, Zea mays
MVRKCLPVAWQSHFVPSKRLPLLEESLKKLDTSSTFAVSGIIDQFSQRPLVKDSSSLNRMETINKCFSKRTVEEIIDALEQEISNVSDKWVAATIKSLKKASPTSLKISLRSIREGRTQTLGECLRREYRVVCHVLRGTFSRDLSEGFRAVLLEKDNKPEWIPPRLEQVPDEAVEQYFLRIDDPQWEDLNLPARLPHRRNIESKI

SEQ ID NO: 273 - DNA, 579 bp, Zea mays
  CDS (1)..(579)
atggcgagcggcgccgtgtttcctgcgagcccgtccgccatgaagttcatgaagctcgggtccaagccggacgccttccagaccgacggcggcggcggcggcgacgccagatacgtgctgtcagaccttccgtcagacatcgtcgtccatgtcgacgacgcagggttctacctgcacaagttcccccttctctccaagagcggtctgttacagaggctgatagtagaggcgagccagaacggcagcgacgaagttgccatacaagacgtccctggcggagcgaagaccttcgagatctgcgcgaagttctgctacggcatggtggtgaccctgaacgcgtacaacgtcgtcgccgcgaggtgcgcggcggagtaccttgggatgaccgaggacgtcgagaagagcaacctggtgttcaagatcgaggtgttcctgagctccggcatcttcaggagctggaaggactcgatcatcgcgctgcagaccaccgacgcgttgctgccgtggtcggaggagctcaagctggtcggcagatgcgtggactctgtcgctgccaaggctaccgtcagcgcgtcgtga

SEQ ID NO: 274 - protein, 192 aa, Zea mays
MASGAVFPASPSAMKFMKLGSKPDAFQTDGGGGGDARYVLSDLPSDIVVHVDDAGFYLHKFPLLSKSGLLQRLIVEASQNGSDEVAIQDVPGGAKTFEICAKFCYGMVVTLNAYNVVAARCAAEYLGMTEDVEKSNLVFKIEVFLSSGIFRSWKDSIIALQTTDALLPWSEELKLVGRCVDSVAAKATVSAS

SEQ ID NO: 275 - DNA, 639 bp, Zea mays
  CDS (1)..(639)
atgcgaagagggtgctcgaggagggcgacgatccggccacttcctgctcgcctcgccgccgatcccgcgccctggagccactctccccgcggcgggaccgccggagtcctcgggcgcgcggagagaatggaggcggcgctggaggcggcgcgcgccaaggacaccaaggagcgtctggccggggtcgagcggctgcacgaggcgcttgacgtcgcggcgcgtcgcgggctgacggcggccgaggtcaccgcgctggtggacacctacatggatctgacgcgggatgccaacttccgcatcgcccagggcggcctccaggcgctctccgccgcggtcgtcgtcggcggcgaccacttcaagatccacctcaactccctcgtctccgccgccgtcgagcgcctcggcgacagcaaacagcccatccgcgacgccgcgcgccagctcctcatcacgctcatggaggagatgtacaagcacatgggatcacaatttcatgaagcattgcagcgccataatctgccttcttacatgctaaaagaaataaattcaaggttggataaaatagaaccaaaggttcgatcatctgatacagcaatgcagtataaggctgtagagtctagaggcaatgctgggatgtga

SEQ ID NO: 276 - protein, 212 aa, Zea mays
MRRGCSRRATIRPLPARLAADPAPWSHSPRGGTAGVLGRAERMEAALEAARAKDTKERLAGVERLHEALDVAARRGLTAAEVTALVDTYMDLTRDANFRIAQGGLQALSAAVVVGGDHFKIHLNSLVSAAVERLGDSKQPIRDAARQLLITLMEEMYKHMGSQFHEALQRHNLPSYMLKEINSRLDKIEPKVRSSDTAMQYKAVESRGNAGM

SEQ ID NO: 277 - DNA, 846 bp, Zea mays
  CDS (1)..(846)
atggagagaccgacaaccaaacactcatttctccatcatcttgagagaaaaaaacagagcaagtatattagagatctcatggcgatggcggtctccggagctgtcctcagtgggcttggttcttcgttcctcaccggaggcaagaggagtgccaccgcattgggaagcggcgtaggcactggagctcagagagttggcaggaaaactcttattgtcgctgctgcggctgctcagcctaagaaatcttggatccctgccgttaaaggtggtggcaacttccttgaccctgaatggctcgatggctcgctaccaggagatttcgggttcgacccattgggtttggggaaagacccggcttttctgaaatggtacagagaggctgagctgatccatggccgatgggcgatggcagcggttcttgggatcttcgtcggccaggcctggagcggtgtggcatggtttgaagctggagcccagccagacgcgatcgctcccttctcgttcgggtcgcttcttggaacccaattgcttctcatgggttgggtggagagcaaacgatgggtcgatttcttcaacccggattctcaatcggttgagtgggcaacgccatggtcgaagaccgccgagaatttcgcgaactataccggcgatcagggataccccggtgggagattcttcgatccgttgggtctcgccgggaaaaaccgcgacggtgtttatgagccggactttgagaagctggagaggctgaaattggcagagattaagcactcgaggctcgcaatggttgccatgttgatcttttactttgaggccgggcaggggaaaacgcctctcggtgcttga

SEQ ID NO: 278 - protein, 281 aa, Zea mays
MERPTTKHSFLHHLERKKQSKYIRDLMAMAVSGAVLSGLGSSFLTGGKRSATALGSGVGTGAQRVGRKTLIVAAAAAQPKKSWIPAVKGGGNFLDPEWLDGSLPGDFGFDPLGLGKDPAFLKWYREAELIHGRWAMAAVLGIFVGQAWSGVAWFEAGAQPDAIAPFSFGSLLGTQLLLMGWVESKRWVDFFNPDSQSVEWATPWSKTAENFANYTGDQGYPGGRFFDPLGLAGKNRDGVYEPDFEKLERLKLAEIKHSRLAMVAMLIFYFEAGQGKTPLGA

SEQ ID NO: 279 - DNA, 879 bp, Zea mays
  CDS (1)..(879)
atgggagcagccatggcttcatcggtggccgccgcggcgagcacattcctgggcacccgcctggcggacccggcgccacagaacgggcgcatcgtggcccggttcgggttcgggttgggcggcaaggcgaagcctgctccgaagaaggtggcgaagacatcgacctcctctgaccggccgctgtggttccccggcgccgtggcgcccgactacctggacggctcgctggtcggcgactacgggttcgacccgttcggtctcgggaagcccgtggagtacctgcagttcgagttggactcgctggaccagaacctggccaagaatgaggccggcggcatcatcggcacccggttcgagtcctccgaagtcaagtccaccccgttgcagccctacagcgaggtgttcggcctccagcggttccgcgagtgcgagctcatccacggccgctgggccatgctcgccaccctcggcgccctctccgtcgagtggctcaccggcgtcacctggcaggacgccggcaaggtggagctggtggacgggtcctcctacctgggccagccgctgccgttctccatctcgacgctcatctggatcgaggtgctcgtgatcggctacatcgagttccagcgcaacgccgagctcgacccggagaagaggctgtaccccggcggctcctacttcgacccgctcggcctggcggccgaccctgagaagaaggagcggctgcagctggcggagatcaagcacgcgcggctcgccatggtcgccttcctcggcttcgccgtgcaggccgccgccaccggcaaggggccgctcaacaactgggccacccacctgagcgacccgctccacaccaccatcttcgacacgttcggatga

SEQ ID NO: 280 - protein, 292 aa, Zea mays
MGAAMASSVAAAASTFLGTRLADPAPQNGRIVARFGFGLGGKAKPAPKKVAKTSTSSDRPLWFPGAVAPDYLDGSLVGDYGFDPFGLGKPVEYLQFELDSLDQNLAKNEAGGIIGTRFESSEVKSTPLQPYSEVFGLQRFRECELIHGRWAMLATLGALSVEWLTGVTWQDAGKVELVDGSSYLGQPLPFSISTLIWIEVLVIGYIEFQRNAELDPEKRLYPGGSYFDPLGLAADPEKKERLQLAEIKHARLAMVAFLGFAVQAAATGKGPLNNWATHLSDPLHTTIFDTFG

SEQ ID NO: 281 - DNA, 567 bp, Zea mays
  CDS (1)..(567)
atgcatccgagcgcggtcagtttcgactccggcgacgggcggcggcgcggtggcgcgcagatgctgctcttcggcggcggaggcagcgccaacagcaacggcttcttccgaggtgttccgatggcagtcctggccatggacgacgcgacgcgcgtgggcaagcggcccttcttcacgacacacgaggagctcctagaggaggagtactacgacgagcaggcgccggagaagaagcgccgactgacggcggagcaggtgcagctgctggagcggagcttcgaagaagagaacaagctggagccggagcgcaagaccgagctggctcgccgcctggggatggcgccccgccaggtagctgtttggttccagaaccgccgcgcgcgctggaagaccaagcaactcgagaccgactatgaccgcctcaaggctgcttacgacgcactcgccgccgaccaccagggcctcctggccgacaacgataacctccgggcacaggtcatcataaaaagttcgatgtcatggtgcgatgaaaagactgcaagtgcaagcatatccgtaggaaactga

SEQ ID NO: 282 - protein, 188 aa, Zea mays
MHPSAVSFDSGDGRRRGGAQMLLFGGGGSANSNGFFRGVPMAVLAMDDATRVGKRPFFTTHEELLEEEYYDEQAPEKKRRLTAEQVQLLERSFEEENKLEPERKTELARRLGMAPRQVAVWFQNRRARWKTKQLETDYDRLKAAYDALAADHQGLLADNDNLRAQVIIKSSMSWCDEKTASASISVGN

SEQ ID NO: 283 - DNA, 492 bp, Zea mays
  CDS (1)..(492)
atgccacctcacccctcccgccccctccctcctcagatccggccatctcctgcccgcctcgccgccggtcccgcggcccggaaccctaaagctcacccccgtggcggtgcccccggtcgcgtggggagaatggaggcggcgctggaggcggcgcgcgccaaggacaccaaggagcgcctggccggggtcgagcggctgcacgaggcgctcgacgccgcggcgcgccgcgggctgaccgcggccgaggtcaccgcgctcgtggacacctgcatggatctgacgcgggacgccaacttccgcatcgcccagggcggcctccaggcgctctccgccgccgccgtcgtcgccggcgaccacttcaagatccatctcaacgccctcgtcccggccgccgtcgaacgcctcggcgacggcaagcagcccgttcgcgacgccgcgcggcagctcctcattactctgatggaggtgagcttcctttcgtcgccgttctga

SEQ ID NO: 284 - protein, 163 aa, Zea mays
MPPHPSRPLPPQIRPSPARLAAGPAARNPKAHPRGGAPGRVGRMEAALEAARAKDTKERLAGVERLHEALDAAARRGLTAAEVTALVDTCMDLTRDANFRIAQGGLQALSAAAVVAGDHFKIHLNALVPAAVERLGDGKQPVRDAARQLLITLMEVSFLSSPF

SEQ ID NO: 285 - DNA, 2016 bp, Zea mays
  CDS (1)..(2016)
atgtccgcacccaaagctgacacaccaaaaggtgcgccgcgggtgatgccagctcaggctcacaacacgagcaatctcgcgttgatctccagtgatgaaaggggcacgaggctgctggaccagttcgaggacacgctggtgcgcgtcctcgtcgccgccgccgccgtctccttcctcctcgcgctctcctccagcgccggcacactcacgctcgccgccttcgtcgagccgctcgtcatcttcctcatcctcgtcgtcaacgccgccgtcggggtctggcaggaggccaacgcggagcggcgcgtggacgcgctgcgggagatccagtcccaccacgccgccgtcctgcgcgacgcccgatgcgtcccccgcgctccactggcccgggacctcgtcccgggcgacgtcgtccagctccgcgtcggggcaaaggtgcccgccgacatgcgcgtgccagcctcgcgtgcacctcctagctccgcctcgagcagggcttcgctcacgggggagacggcctccgtcaacaagacctcccgcgcgctcccgctcgaggacgccgacatccaggccaaggactgcatggtcttcgccggcaccaccgtcgtcaacggcgccgcgctctgcatcgtcgcgcgcaccgggatggacacggagatcggcgccatccacgcccagatccaccaggcctcgcaggaggacgacgacacgccgctcaagaagaagctcaacgagttcggggaggcgctcaccaagatcatcggcctcatctgcgccctcgtctggctcatcaactgcaagtacttcctcaccttcgacctccagggaggatgggtgcccaggaacatcaccttctccttcgagaagtgcacctactactttgagatcgccgtcgcgctcgccgtcgccgccatacccgagggcctgcccgccgtcatcaccacctgcctcgcgctcgggaccaggaagatggctgccaagaatgcgctcgtcaggaagctgcctagcgtcgagaccctcggctgcaccaccgtcatctgctccgacaagaccggcacgctcacctccaacaagatgtccgtcgccaagctcgtggccgtcggcgattcctcgcaggaggttaggaccttcaaggtggacggtacgacttacgatccccgggacgggaaaattcacgactggcctgctgggagcattgacgccaaccttgagacgatcgccaaggtcgcagctgtgtgcaatgatgccaatgtggcacattcttcgcatcagtatgttgccactggaatgccgacagaggcagctcttaaggttttggttgagaaaatgggtctgcctggaggaaagaatggtctgtccttggatccgtctgagatactaggctgttgcgcatggtggaacaatgttgccaaaaggattgctaccctcgagtttgatcgcacaaggaaatcaatgggcgtcgttgtgaaaacaagttcaggaagcaatgccctgctcgtgaagggtgctgttgaaactttgcttgagcgaagtagccacattcagctgaaggatggttccgtggtgccattagatgagaaagcaaagagaactatcctggcaagcctccatgagatgtcgaccaatgctctgcgctgcctcggttttgcatacaaggaggcgctagcagaatttccaacatatgatggcgagaaccatcctcctcataacctcttcctggatccggccaattatgcagctattgagactgacctaatatttgcgggtcttgtaggcctaagggacccaccccgggaagaggtctatgatgctattgaagattgcagagctgctggcatccgagttatggtgataacaggggacaacaaagaaaccgctgaggcaatatgccgtgaaatcggcgtgttttcacctgacgaggatatcaccttcaagagccttacaggggaaggagttcatggcgctggaggacaagaagaccgcgcgtctgccagtaaaaggtggtctcctgttctctga

SEQ ID NO: 286 - protein, 671 aa, Zea mays
MSAPKADTPKGAPRVMPAQAHNTSNLALISSDERGTRLLDQFEDTLVRVLVAAAAVSFLLALSSSAGTLTLAAFVEPLVIFLILVVNAAVGVWQEANAERRVDALREIQSHHAAVLRDARCVPRAPLARDLVPGDVVQLRVGAKVPADMRVPASRAPPSSASSRASLTGETASVNKTSRALPLEDADIQAKDCMVFAGTTVVNGAALCIVARTGMDTEIGAIHAQIHQASQEDDDTPLKKKLNEFGEALTKIIGLICALVWLINCKYFLTFDLQGGWVPRNITFSFEKCTYYFEIAVALAVAAIPEGLPAVITTCLALGTRKMAAKNALVRKLPSVETLGCTTVICSDKTGTLTSNKMSVAKLVAVGDSSQEVRTFKVDGTTYDPRDGKIHDWPAGSIDANLETIAKVAAVCNDANVAHSSHQYVATGMPTEAALKVLVEKMGLPGGKNGLSLDPSEILGCCAWWNNVAKRIATLEFDRTRKSMGVVVKTSSGSNALLVKGAVETLLERSSHIQLKDGSVVPLDEKAKRTILASLHEMSTNALRCLGFAYKEALAEFPTYDGENHPPHNLFLDPANYAAIETDLIFAGLVGLRDPPREEVYDAIEDCRAAGIRVMVITGDNKETAEAICREIGVFSPDEDITFKSLTGEGVHGAGGQEDRASASKRWSPVL

SEQ ID NO: 287 - DNA, 1173 bp, Zea mays
  CDS (1)..(1173)
atggacgctcggtgggcggtgctgctcgcgctgctggtcgccagcggcggcgtccgtgtctgcgccgccgctggggccaagggcgccaactggctgggcgggctgagccgcgcgtcgttccccaaggggttcgtgttcgggacggcgacgtcggcgtaccaggtcgagggcgccgcgtccaccaacggccggggcccctccatctgggattcattcgcgcacgtcccaggaaatattgcagggaatcaaaatggagacgttgcagtggatcaataccatcgctacaaggaagacgtcgatctcatgaaaagtttgaactttgatgcctaccggttctcaatctcatggtccaggatcttcccggatggcgaagggaaagtcaatccagaaggtgtagcgtattacaataatttgataaactatctgcttcagcaaggcatgactccttacatcaacctttaccactatgatcttcctcttgcgcttgagaagaaatatggagggtggttaagcgcgaagatggcggacttgtttacagactatgctgacttctgttttaagacctacggcgatcgcgtaaagcactggtttacattcaatgagccaaggatagtagcgctacttggctatgacacagggtcaaatcctcctcaaaggtgcaccagatgcgctgctggtgggaattcagcaaccgaaccttacatagttgctcataattttctcttggcacatgctactgcagttgcaagataccgtacgaaatatcaggctgctcagaagggtaaggtcggaatagtcctggacttcaactggtacgaggctcttacaaactcacctgatgaccaagcagcagcccaaagagccagggacttccacattggctggtttgttgatccattgataaacggacactatccacagataatgcaagatctcgtgaaggagaggctgcccaggttcactcctgagcaggctaaactggtgaagggctcggcagactacatcggtatcaacgagtacacatccagctacatgaaggggcagaagctggtccagctggcgcccagtagctactctgccgattggcagttgcacgcaatggcaaaccgattggaccacaggcgaattctaagtggctctacatcgccccgacggggatgtacgggtgcgtga

SEQ ID NO: 288 - protein, 390 aa, Zea mays
MDARWAVLLALLVASGGVRVCAAAGAKGANWLGGLSRASFPKGFVFGTATSAYQVEGAASTNGRGPSIWDSFAHVPGNIAGNQNGDVAVDQYHRYKEDVDLMKSLNFDAYRFSISWSRIFPDGEGKVNPEGVAYYNNLINYLLQQGMTPYINLYHYDLPLALEKKYGGWLSAKMADLFTDYADFCFKTYGDRVKHWFTFNEPRIVALLGYDTGSNPPQRCTRCAAGGNSATEPYIVAHNFLLAHATAVARYRTKYQAAQKGKVGIVLDFNWYEALTNSPDDQAAAQRARDFHIGWFVDPLINGHYPQIMQDLVKERLPRFTPEQAKLVKGSADYIGINEYTSSYMKGQKLVQLAPSSYSADWQLHAMANRLDHRRILSGSTSPRRGCTGA

SEQ ID NO: 289 - DNA, 1323 bp, Zea mays
  CDS (1)..(1323)
atgagtacaaccaaggtgaagagacgtgtgggcaagtatgagctcggccggaccataggcgagggcaccttcgcgaaggtcaggttcgcgagggacacggtcaccggcgaggccgtggccattaagatcctggacaaggagaaggtcctcaggcacaagatggttgagcagatcaagcgggagatctcgacgatgaagctgatcaagcaccctaacgtcgtccgcatatacgaggtgatgggaagtaaaacaaagatctacattgtgttagaattcgctaccggtggcgagctctttgatacaattgttaaccatggtcgaatgagggaagacgaggcaaggaggtacttccaacagttaatcaatgcagttgattattgtcatagcaggggtgtgtaccaccgggatttaaaacctgaaaatttgctgcttgattcatatggtaacctgaaggtctctgactttgggctcagcgcgctatctcagcaaatcaaggatgatggactgctgcacacaacttgtgggactccaaactatgttgcaccagaggtccttgaagatcaaggctacgatggagcaatggctgatctgtggtcatgtggagttatcctgtttgttctgctagcagggtatttgccgtttgaggattctaatctcatgactttgtataagaaaatatcaaatgcagaatttacatttccaccatggacatcttttcctgccaagaggttgttaacaagaatccttgatccaaatccaatgacgagaataacaatcccagaaatattagaggatgagtggttcaaaaagggctacaagcgcccagaatttgatgaacaatatgacaccacattggatgatgtggatgccgtcttcaatgattcagaagagcaccatgtgacagaaaagaaagaagaagaaccagtagctctgaacgcattcgaactgatttcgatgtcagcgggcctaaaccttggaaacttatttgactcagagcaggagttcaaaagagaaacaaggtttacatcaaaatgtccccccaaagaaattgtccgcaagatcgaggaagctgcaaaacctctaggatttgatgttcagaagaaaaattacaagttgaggctcgaaaaggtaaaggcagggaggaagggaaacctcaacgttgctactgagatactgcaagttgcgccctctctccacatggtagaagtccgaaaagcaaagggtgacactctggaatttcataagttctacaagaacctttccaagaccttgaaggacgtcgtctggaaatccgacgatcttcaaacgcaacatgcttcttga

SEQ ID NO: 290 - protein, 440 aa, Zea mays
MSTTKVKRRVGKYELGRTIGEGTFAKVRFARDTVTGEAVAIKILDKEKVLRHKMVEQIKREISTMKLIKHPNVVRIYEVMGSKTKIYIVLEFATGGELFDTIVNHGRMREDEARRYFQQLINAVDYCHSRGVYHRDLKPENLLLDSYGNLKVSDFGLSALSQQIKDDGLLHTTCGTPNYVAPEVLEDQGYDGAMADLWSCGVILFVLLAGYLPFEDSNLMTLYKKISNAEFTFPPWTSFPAKRLLTRILDPNPMTRITIPEILEDEWFKKGYKRPEFDEQYDTTLDDVDAVFNDSEEHHVTEKKEEEPVALNAFELISMSAGLNLGNLFDSEQEFKRETRFTSKCPPKEIVRKIEEAAKPLGFDVQKKNYKLRLEKVKAGRKGNLNVATEILQVAPSLHMVEVRKAKGDTLEFHKFYKNLSKTLKDVVWKSDDLQTQHAS

SEQ ID NO: 291 - DNA, 918 bp, Zea mays
  CDS (1)..(918)
atgcgtcttctccaactcgcacctcgttcctcgccccaccatttgccgctcccgcctacgatgtcgacgagtgaggtgtggagcttgtccgatttcgaaatcagcaagtacatcggtgagggcaggttcggcaaggtctacctcgcccgcgagaagcagagcgggtacgtggtggcgctcaaggtgatatttaaggcgaaactgcagaagtaccacttccacgcgcacctgcggcgggagatcgagatccagcagagtctcgaccaccctaacgtgctccgcctcttcacctggttccacgacgaagagcgagtcgtcctcgtcctcgagtacgcggcccgtggcgagctctacaaggtccttcgcgctgctggccgcttcaccgagcgcacgtccgccacatatgtagcgagtcttgctggtgcactggcatactgtcacaaaaagcaagtcattcatagggacatcaagcctgagaatttgctaatcgacatcgagggccggcttaaaattgcagattttggatgggcggctcgttcaaatgctaaacgccacacactctgtggcacaatcgattatctggcaccagagatggtagagaaaaaagctcatgaccatgctgtggacaactggacattaggaatcctgtgctatgagttcttatatggttcacctccttttgaagctgatgaacaggatgataccttgagaaggatagttagggtggatttggcattcccttcatctccttgtgtatcttcagaggctaaggatctcatttccaagcttctagttaaggattcaagcaagaggctttgccttgaagacatcatgaagcatccatggataaagaagaatgcagacccttcaggcagttgcattaagcaaaaagatgtcacaagatcaaagcttctgtga

SEQ ID NO: 292 - protein, 305 aa, Zea mays
MRLLQLAPRSSPHHLPLPPTMSTSEVWSLSDFEISKYIGEGRFGKVYLAREKQSGYVVALKVIFKAKLQKYHFHAHLRREIEIQQSLDHPNVLRLFTWFHDEERVVLVLEYAARGELYKVLRAAGRFTERTSATYVASLAGALAYCHKKQVIHRDIKPENLLIDIEGRLKIADFGWAARSNAKRHTLCGTIDYLAPEMVEKKAHDHAVDNWTLGILCYEFLYGSPPFEADEQDDTLRRIVRVDLAFPSSPCVSSEAKDLISKLLVKDSSKRLCLEDIMKHPWIKKNADPSGSCIKQKDVTRSKLL

SEQ ID NO: 293 - DNA, 477 bp, Zea mays
  CDS (1)..(477)
atggaggcggcgctggaggcggcgcgcgccaaggacaccaaggagcgtctggccggggtcgagcggctgcacgaggcgctcgacgccgccgcgcggcgcgggctggcggcggccgaggtcaccgcgctggtggacacctgcatggatctgacgcgggacgccaacttccgcatcgcccagggcggcctccaggcgctctccgccgccgccgtcgtcgccggcgaccacttcaagatccacctcaacgccctcgtccccgccgccgtcgagcgcctcggcgacggcaagcagcccgtccgcgacgccgcgcgccagctcctcatcacgctcatggaggtgagctcctttcgtcggcgctctcagtggcctgtcgtctctcccgggaatgcatgtagctggggagctagattaagttgcgaattcgaactaagagatcgagcaggagcagattgggggattgagggctgttttttttga

SEQ ID NO: 294 - protein, 158 aa, Zea mays
MEAALEAARAKDTKERLAGVERLHEALDAAARRGLAAAEVTALVDTCMDLTRDANFRIAQGGLQALSAAAVVAGDHFKIHLNALVPAAVERLGDGKQPVRDAARQLLITLMEVSSFRRRSQWPVVSPGNACSWGARLSCEFELRDRAGADWGIEGCFF

SEQ ID NO: 295 - DNA, 696 bp, Zea mays
  CDS (1)..(696)
  misc_feature (612)..(612): n at position 612 is a or g or c or t/u
atggggaggggacgcgtcgagctgaagcggatcgagaacaagatcaaccgccaggtcactttctccaagcgccgcaacggcctgctcaagaaggcctacgagctctccgtgctctgcgacgccgaggtcgcgctcatcatcttctccggccgcggcaagctctacgagttcggcagcgccggcgtaactaaaactttagaaaggtatcaacatttctgctacaatgctcaagattccaacaatggtgcactctctgaatctcagagctggtaccaggaaatatcaaaactgagggcaaaattcgaggccttgcagcgcactcagagacacttgcttggggaggaccttggcccactgagtactgtgaaggaattgcagcagctagagaaacagctagaatgtgctttgtcacaggcaagacagagaaagacgcaacttatgatggagcaagtggaagagcttcgccgaacggagcgtcacctgggagaaatgaacaggcaactcaaacacaagctcgaagctgaaggctgtagcaactacacaaccttgcagcatgccgcctgctggccagctcccggcggcaccatcgtggagcatgacggcgccacctancaagtgcatccgcctgcccactcagttgctatggactgtgaacccactctgcaaatcgggtaccctcatcaccagtttccgtga

SEQ ID NO: 296 - protein, 231 aa, Zea mays
  misc_feature (204)..(204): Xaa can be any amino acid
MGRGRVELKRIENKINRQVTFSKRRNGLLKKAYELSVLCDAEVALIIFSGRGKLYEFGSAGVTKTLERYQHFCYNAQDSNNGALSESQSWYQEISKLRAKFEALQRTQRHLLGEDLGPLSTVKELQQLEKQLECALSQARQRKTQLMMEQVEELRRTERHLGEMNRQLKHKLEAEGCSNYTTLQHAACWPAPGGTIVEHDGATXQVHPPAHSVAMDCEPTLQIGYPHHQFP

SEQ ID NO: 297 - DNA, 414 bp, Zea mays
  CDS (1)..(414)
atggcgctcgcsccacctccgctgccgtgctcaagaccccgttcctcggggccaggcgcgcgctcgccaagcccgcgcctcgccgcgcgctcgtcatcgccgccgcggccgccgccaagaagtcgtggatcccggccatcaagagcgacgccgagatcgtcaacccgccctggctcgacggctcgctccccggcgacttcgggttcgacccgctggggctgggcaaggacccggcgttcctcaagtggtaccgggaggcggactgatccacgggcggtgggcgatggcggccgtggctgggcatcttcgtggggcaggcgtggagcggcatcccgtggttcgaggccggcgcggacccgagcgccatcgcgcccttctccttcgggtcgctgctgggcacgcagctgctgctga

SEQ ID NO: 298 - protein, 137 aa, Zea mays
MALAPPPLPCSRPRSSGPGARSPSPRLAARSSSPPRPPPRSRGSRPSRATPRSSTRPGSTARSPATSGSTRWGWARTRRSSSGTGRRTDPRAVGDGGRGWASSWGRRGAASRGSRPARTRAPSRPSPSGRCWARSCC

SEQ ID NO: 299 - DNA, 1701 bp, Zea mays
  CDS (1)..(1701)
atggcaaaaatggcaaaggctctcctaggtggcctatcggcgatcctcgtcgtggcggtggtcgtcggtgtggtcgccaccgtcacccgctccggcaagaaggccggcgacaacttcacggtcccgggggaggcttcccttgccacgtccggcaagtcggtcaagtccctgtgcgcgcccaccctatacaaggagtcgtgcgagaagacactgtcccaggccaccaatggcaccgagaaccccaaggaggtgttccacagcgtggccaaggtggcgctggagtcggtccagacggcggtcgagcagtccaagtcgatcggcgaggccaaggccagcgactccatgaccgagagcgcgcgcgaggactgcaagaagctcctggaggacgccgccgacgacctgaggggcatgctcgagatggccggcggcgacatcaaggtgctgttcagccggtccgacgacctcgagacctggctcacgggcgtcatgacgttcatggacacctgcgtcgacggcttcgtcgacgagaagctcaaggccgacatgcactccgtgctgcgcaacgccaccgagctcagcagcaacgcgctggccatcaccaacagcctcggcgggatcctgaagaagatggacctcggcatgttcagcaaggactcgcgccgccgactgctgtcgtcggagcaggatgagaagggctggcccgtgtggatgcggtcgccggagaggaagctgctggcgtcgggcaaccagcccaagccgaacgcgatcgtggccaaggacggcagcgggcagttcaagagcatccagcaggccgtggacgccgtgcccaagggccatcaggggaggtacgtcatctacgtgaaggccggcctctacgacgagatcgtcatggtccccaaggacaaggtcaacatcttcatgtacggcgacgggcctaagcaaagccgcgtgaccggccgcaagagcttcgccgacggcatcaccaccatgaagaccgccaccttctccgtcgaggcgtccgggttcatctgcaagaacatggggttccacaacacggccggcgcggagcggcaccaggcggtggcgctccgggtgcagggggacctcgcggcgttctacaactgccggttcgacgcgttccaggacacgctgtacgtgcacgcgcggcggcagttcttccgcaactgcgtggtctccggcaccatcgacttcatcttcggcaactcggcggcggtgttccagaactgcctcatcatcacgcggcggcccatggacaaccagcagaactcggtgacggcgcacggccgcaccgaccccaacatgaagtccgggctcgtcatccagaactgccgcctggtgcccgaccagaagctgttcccggaccgcttcaagatcccctcgtacctgggccgcccctggaaggagttctcgcgcctcgtcatcatggagagcaccatcgccgacttcgtcaagccagaggggtacatgccctggaacggcgacttcgccctcaagacgctctactacgccgagtacaacaaccgcgggcccggcgccggcaccagcaagagggtcaactggcccggcttccacgtcatcggacggaaggaggccgagccgttcaccgccgggccgttcatcgacggcgccatgtggctcaagtacaccggcgcgccgcacatacttggtttcaagttctga

SEQ ID NO: 300 - protein, 566 aa, Zea mays
MAKMAKALLGGLSAILVVAVVVGVVATVTRSGKKAGDNFTVPGEASLATSGKSVKSLCAPTLYKESCEKTLSQATNGTENPKEVFHSVAKVALESVQTAVEQSKSIGEAKASDSMTESAREDCKKLLEDAADDLRGMLEMAGGDIKVLFSRSDDLETWLTGVMTFMDTCVDGFVDEKLKADMHSVLRNATELSSNALAITNSLGGILKKMDLGMFSKDSRRRLLSSEQDEKGWPVWMRSPERKLLASGNQPKPNAIVAKDGSGQFKSIQQAVDAVPKGHQGRYVIYVKAGLYDEIVMVPKDKVNIFMYGDGPKQSRVTGRKSFADGITTMKTATFSVEASGFICKNMGFHNTAGAERHQAVALRVQGDLAAFYNCRFDAFQDTLYVHARRQFFRNCVVSGTIDFIFGNSAAVFQNCLIITRRPMDNQQNSVTAHGRTDPNMKSGLVIQNCRLVPDQKLFPDRFKIPSYLGRPWKEFSRLVIMESTIADFVKPEGYMPWNGDFALKTLYYAEYNNRGPGAGTSKRVNWPGFHVIGRKEAEPFTAGPFIDGAMWLKYTGAPHILGFKF

SEQ ID NO: 301 - DNA, 396 bp, Zea mays
  CDS (1)..(396)
atgaggtgggcggcaatggaggatgcgatggcggcggacgggaagagcgtgctgcaggggcggtacgagctggggcgggtgctggggcacggcaacttcgggcgggtgcacgcggcgcgggacctgcgcacgggccgcagcgtcgcggtcaaggtggtggccaaggacaagctggagcgcgcgggcatggcggagcagatcaagcgggagatcgccgtcatgaagatggtgtcccaccccaacatcgtggagctgcacgaggtgatggccacccgctccaagatctacctcgcgctcgagctcgtccgcggcggggagctcttctcccgcatcgcgcgcgcggggcgggtccgggaggacgtggcgcgctgttacttccggcagctcgtcgcctga

SEQ ID NO: 302 - protein, 131 aa, Zea mays
MRWAAMEDAMAADGKSVLQGRYELGRVLGHGNFGRVHAARDLRTGRSVAVKVVAKDKLERAGMAEQIKREIAVMKMVSHPNIVELHEVMATRSKIYLALELVRGGELFSRIARAGRVREDVARCYFRQLVA

SEQ ID NO: 303 - DNA, 522 bp, Zea mays
  CDS (1)..(522)
atgaggttcacagtaaccttcatctgtcggaagatgtatcgggctaagagggctgcattgtcaccgaaggtgaagcgccgcgtcggcaagtacgagctcgggcgcaccattggggaagggaccttcgccaaggtccggtttgctaagaacactgaaaacggggaacctgttgctatcaaaatccttgacaaggagaaggttaagaggcacagattggttgagcagattaagcgtgaaatttgtatcatgaaattagtaaggcaccctaatgttgttcgactgtttgaggtgatgggaagtaaagcaagaattttcatcgttctggaatatgttaccggcggagagctttttgaaatcattgctactaatggaaggttgaaggaagacgaagcacgtaaatacttccagcaactgattaatgctgttgattactgccacagtaggggagtgtatcacagagacttgaagctcgagaatttgctgcttgatgctgcaggaaatctcaaagtttctgacttttga

SEQ ID NO: 304 - protein, 173 aa, Zea mays
MRFTVTFICRKMYRAKRAALSPKVKRRVGKYELGRTIGEGTFAKVRFAKNTENGEPVAIKILDKEKVKRHRLVEQIKREICIMKLVRHPNVVRLFEVMGSKARIFIVLEYVTGGELFEIIATNGRLKEDEARKYFQQLINAVDYCHSRGVYHRDLKLENLLLDAAGNLKVSDF

SEQ ID NO: 305 - DNA, 360 bp, Zea mays
  CDS (1)..(360)
atggacaaagtgttccctaaggattcagcagtgcagccgtctctggtaatagtttactttggtggaaacgactcaattgatgctcattgttccggtctcgggcctcatgtgccgctagatgagtacatagggaacatgagaaagattgcagaacacctaaagagcctctccgagaagacacgggtccttttcctgagctgcccacctctgaacgaggagatgcttcgaaactcaaccagtactatactgagtgagatcgtccggaccaacgaaacctgccgtctgtactctgacgtgtgcgtagctctgtgcaaggagatgcacctgaaggtggttgatctctggcatgccatgcagtga

SEQ ID NO: 306 - protein, 119 aa, Zea mays
MDKVFPKDSAVQPSLVIVYFGGNDSIDAHCSGLGPHVPLDEYIGNMRKIAEHLKSLSEKTRVLFLSCPPLNEEMLRNSTSTILSEIVRTNETCRLYSDVCVALCKEMHLKVVDLWHAMQ

SEQ ID NO: 307 - DNA, 666 bp, Zea mays
  CDS (1)..(666)
atgtgtaccaggttcaatctgttccaatttccccctgttcacaaaatagccatcatgcttagttttcaaattatcaacttcgaaatattcatccaattcggcatcatcaatgaaagaatcctcagtgtcatactgatcatcatctggtacatcattaagatcctcttcatcgctgctatgttttcccacataaaggcgctctattttttcaatcactgcattgaaccgatttggctgtgttggatcctttgggtcattttctgcaggatgtgccggaccagatgggcccgcatgtgcggcgaacgctggctccaccgccactggcggtgccgcggcggtgtgcccggcctccttgagaagcttcttccacgacacgattgtggtctcccctggccgcagctccactgtgaacagctgcctctggcacggcgtcgcggcttcagagaccgcggccgcggtggcaggcggctgcgtcggagcgagagcggacggcgcagaggtgacgccaggggctgctgccaccgcacccggaaccctagctgcggcggcagcggcagggtcggtcaaggacgaggagggtaccgccacggggtcttccatggagaggctgggggaattgagaattcgagagctcacggcattagatcgaaggacctagggttttga

SEQ ID NO: 308 - protein, 221 aa, Zea mays
MCTRFNLFQFPPVHKIAIMLSFQIINFEIFIQFGIINERILSVILIIIWYIIKILFIAAMFSHIKALYFFNHCIEPIWLCWILWVIFCRMCRTRWARMCGERWLHRHWRCRGGVPGLLEKLLPRHDCGLPWPQLHCEQLPLARRRGFRDRGRGGRRLRRSESGRRRGDARGCCHRTRNPSCGGSGRVGQGRGGYRHGVFHGEAGGIENSRAHGIRSKDLGF

SEQ ID NO: 309 - DNA, 1110 bp, Zea mays
  CDS (1)..(1110)
atggcgcactccaccaccttggccctggtgattgtcgttgtgctggcgctcacctttggtgccacggtcagtgtctccgctcccgtgaacaagtcgtgcgtcagcggtagcgccggcgccagcgtgagcattggctacggcggggcaagagccagcgccggcgctggcgtgtcccttggcgccgacgcgtaccggagcacgtgcccccgtgccgaggagatcatccgtgcggccgttgagagggccgtcgctgccgacccacgcatggcagcgtctctcctgcgcctccatttccatgactgcttcgtcaacggctgtgacggctccgttcttctggacgacaagccgttcttcatcggcgagaagacggctgtgcccaacgccaactcaatcaggggcttcgaggtcattgacgccatcaagaccgagctggagcgggagtgcccagatacagtttcctgtgccgacctccttgccatcgctgcccgtgactccgtcgttgcgtctggcgggccgagctgggagattgaggtcggccggaaggacagccgcaccgccagcctgcagggcgccaacaccaacctcccagcaccgacgtctggcgtcgacaccctcgtgcagaagttcaggaacgtgggcctctctaccaaggacatggtcgcactctccggcgcgcacaccatcgggaaagcgcggtgcacttcgttcagtgcgcgccttgccggcgccggcggcgtctcggaaggcggcgcgggcgccttcaaggacctcaccttcttgcagtcgctgcagcagctgtgcacggggtcggctgggtccgcgctggcacacctggacctcgccaccccggcgaccttcgacaaccagtactacatcaacctgctctctggcgacggtctgctgccgtcagaccaggcactggcgtcgtcggctgccgtgcctggggtagaggcggacgtcgccagcctcgtcgccacctacgccttcgacgcctccgtattcttccaggacttcgcggagtccatgctgcggatggggaggcttgcaccgggcgtcggcaccagcggcgaggtccgccggaactgccgggtggtgaacagctccgaatga

SEQ ID NO: 310 - protein, 369 aa, Zea mays
MAHSTTLALVIVVVLALTFGATVSVSAPVNKSCVSGSAGASVSIGYGGARASAGAGVSLGADAYRSTCPRAEEIIRAAVERAVAADPRMAASLLRLHFHDCFVNGCDGSVLLDDKPFFIGEKTAVPNANSIRGFEVIDAIKTELERECPDTVSCADLLAIAARDSVVASGGPSWEIEVGRKDSRTASLQGANTNLPAPTSGVDTLVQKFRNVGLSTKDMVALSGAHTIGKARCTSFSARLAGAGGVSEGGAGAFKDLTFLQSLQQLCTGSAGSALAHLDLATPATFDNQYYINLLSGDGLLPSDQALASSAAVPGVEADVASLVATYAFDASVFFQDFAESMLRMGRLAPGVGTSGEVRRNCRVVNSSE

SEQ ID NO: 311 - DNA, 900 bp, Zea mays
  CDS (1)..(900)
atgcattcctcagccgctgaaagaacactgcccttccaagttaaaggtggagagtgggaaatcgacaaacgacttctgaagatgggagggatggttgcttctggttcttgtggggacttgtatcacgggacttaccttggtgaggatgtagctgttaaagttctaagagctgagcatttgaataagaatgtttggaacgagtttactcaagaagtatatatactaagagaagttcaacatacaaatgttgtgcgattcattggtgcttgcacaaaaccaccccaattttgcataattacagaatacatgtctggaggaagcttatatgactttgtgcacaagcagcataatgttctaaacctcacgactctattgaagtttgcagttgatgtatgccgagggatgtgctacttgcatgaaaggggtatcatccatagagacttgaagactgccaaccttctaatggacaaagatcatgctgtgaaagtggctgattttggtgtagctcggttccaggatcaaggaggtgtcatgacagctgaaactggaacatacagatggatggcacctgaggttataaaccatcaaccctatgataacaaagcagatgttttcagctttgctattgtcatctgggagctgataacgtccaagatcccatatgataccatgacccctctccaagcggctgtaggtgtgagacaggggttgcgcccaggacttccaaagaagacgcacccaaagctattggacttgatgcagagatgctgggaagcagatccatccgaccggcctgctttctcggacattttacccgaactggaggatcttttggcacaagctcagggaacatcgggaaagacggtccaagatccatcaaactcgaacgcgaaagattga

SEQ ID NO: 312 - protein, 299 aa, Zea mays
MHSSAAERTLPFQVKGGEWEIDKRLLKMGGMVASGSCGDLYHGTYLGEDVAVKVLRAEHLNKNVWNEFTQEVYILREVQHTNVVRFIGACTKPPQFCIITEYMSGGSLYDFVHKQHNVLNLTTLLKFAVDVCRGMCYLHERGIIHRDLKTANLLMDKDHAVKVADFGVARFQDQGGVMTAETGTYRWMAPEVINHQPYDNKADVFSFAIVIWELITSKIPYDTMTPLQAAVGVRQGLRPGLPKKTHPKLLDLMQRCWEADPSDRPAFSDILPELEDLLAQAQGTSGKTVQDPSNSNAKD

SEQ ID NO: 313 - DNA, 1341 bp, Zea mays
  CDS (1)..(1341)
atggaatcggaggcggccaggctccctcctcctccctgcaaatcctgcagacaccaccgctcgtttttctctccgggacaggagaaaaggggagagagaggtgaggcgcggtgtccgcccgatctgctctgccccgacgcagctgttacgacctcctcagtctcagtcaggagcaagatgggtgccggcggcaggatgaccgagaaggagcgggagaagcaggagcagctcgcccgtgctaccggtggcgccgcgatgcagcggtcgccggtggagaagcctccgttcactctgggtcagatcaagaaggccatcccgccacactgcttcgagcgctcggtgctcaagtccttctcgtacgtggtccacgacctggtgatcgccgcggcgctcctctacttcgcgctggccatcataccggcgctcccaagcccgctccgctacgcggcctggccgctgtactggatcgcgcaggggtgcgtgtgcaccggcgtgtgggtcatcgcgcacgagtgcggccaccacgccttctcggactactcgctcctggacgacgtggtcggcctggtgctgcactcgtcgctcatggtgccctacttctcgtggaagtacagccaccggcgccaccactccaacacggggtccctggagcgcgacgaggtgttcgtgcccaagaagaaggaggcgctgccgtggtacaccccgtacgtgtacaacaacccggtcggccgggtggtgcacatcgtggtgcagctcaccctcgggtggccgctgtacctggcgaccaacgcgtcggggcggccgtacccgcgcttcgcctgccacttcgacccctacggccccatctacaacgaccgggagcgcgcccagatcttcgtctcggacgccggcgtcgtggccgtggcgttcgggctgtacaagctggcggcggcgttcggggtctggtgggtggtgcgcgtgtacgccgtgccgctgctgatcgtgaacgcgtggctggtgctcatcacctacctgcagcacacccacccgtcgctcccccactacgactcgagcgagtgggactggctgcgcggcgcgctggccaccatggaccgcgactacggcatcctcaaccgcgtgttccacaacatcacggacacgcacgtcgcgcaccacctcttctccaccatgccgcactaccacgccatggaggccaccaaggcgatcaggcccatcctcggcgactactaccacttcgacccgacccctgttgccaaggcgacctggcgcgaggccagggagtgcatctacgtcgagcccgaggaccgcaagggcgtcttctggtacaacaagaagttctga

SEQ ID NO: 314 - protein, 446 aa, Zea mays
MESEAARLPPPPCKSCRHHRSFFSPGQEKRGERGEARCPPDLLCPDAAVTTSSVSVRSKMGAGGRMTEKEREKQEQLARATGGAAMQRSPVEKPPFTLGQIKKAIPPHCFERSVLKSFSYVVHDLVIAAALLYFALAIIPALPSPLRYAAWPLYWIAQGCVCTGVWVIAHECGHHAFSDYSLLDDVVGLVLHSSLMVPYFSWKYSHRRHHSNTGSLERDEVFVPKKKEALPWYTPYVYNNPVGRVVHIVVQLTLGWPLYLATNASGRPYPRFACHFDPYGPIYNDRERAQIFVSDAGVVAVAFGLYKLAAAFGVWWVVRVYAVPLLIVNAWLVLITYLQHTHPSLPHYDSSEWDWLRGALATMDRDYGILNRVFHNITDTHVAHHLFSTMPHYHAMEATKAIRPILGDYYHFDPTPVAKATWREARECIYVEPEDRKGVFWYNKKF

SEQ ID NO: 315 - DNA, 306 bp, Zea mays
  CDS (1)..(306)
atgctgttgctgcctcgccggttgccagaggatggtcctcgccggcgcagcggcccaaaaatccttgcagagattttgtgttgcgcgagttgtctttggcttgcggctacgggatctcctctgctggagagcagacccgccgtttgcgggatagtggaggtggcgatctgggggcgaggagggccgtggcggcggggattacggccacggacaagatgtgggggcgaggagagccggggcggcggggattgcggcctcgcctcaaagagaggagagtcgggtcggggagattgctgcgatgtttga

SEQ ID NO: 316 - protein, 101 aa, Zea mays
MLLLPRRLPEDGPRRRSGPKILAEILCCASCLWLAATGSPLLESRPAVCGIVEVAIWGRGGPWRRGLRPRTRCGGEESRGGGDCGLASKRGESGRGDCCDV

SEQ ID NO: 317 - DNA, 828 bp, Zea mays
  CDS (1)..(828)
atgactctctccctcctaccacacacagcctccggactgctccggacgcgcgcctcagatctactccaacacctccgcagcggcggcgcccgcgggtggaggagcaggagaggcggcgccatggtcgggaccgggaagagggagcggatagcgatacggaggatcgacaacctggcggccaggcaggtgaccttctccaagaggcggcggggcctgttcaagaaggccgaggagctctccatcctctgcgacgccgaggtcggccttgtcgtcttctccgccaccggcaaactcttccacttcgccagctccagcatgaagcaggtaatcgatcggtacgactctcattccaagactctccagaggtccgaaccgcagtcgtctcaactgcagtcacatatggatgacggcacttgtgcaaggctaaaggaggaacttgctgaaacaagccttaagctcaggcagatgagaggagaggagctccagaggctgagcgtcgaacagctgcaggagctcgagaagaccctcgaatccggcctcggctctgtactcaaaaccaagagccaaaaaatccttgacgagatcagcggtctggaaagaaagagaacgcagctgatcgaggagaactcaaggctgaaggagcaactgcaggtgacacggatgtcgaggatggagacgcagcttggcgccgatccagagttcgtgtacgaggaagggcagtcgtctgaatccgtgacgaacacgtcctatccgcgcccgtccaccgacaccgacgactgctccgacacatcgctcaggctcgggctaccactcttcagctccaagtga

SEQ ID NO: 318 - protein, 275 aa, Zea mays
MTLSLLPHTASGLLRTRASDLLQHLRSGGARGWRSRRGGAMVGTGKRERIAIRRIDNLAARQVTFSKRRRGLFKKAEELSILCDAEVGLVVFSATGKLFHFASSSMKQVIDRYDSHSKTLQRSEPQSSQLQSHMDDGTCARLKEELAETSLKLRQMRGEELQRLSVEQLQELEKTLESGLGSVLKTKSQKILDEISGLERKRTQLIEENSRLKEQLQVTRMSRMETQLGADPEFVYEEGQSSESVTNTSYPRPSTDTDDCSDTSLRLGLPLFSSK

SEQ ID NO: 319 - DNA, 1164 bp, Zea mays
  CDS (1)..(1164)
atgataccttccgtgaggctctctcctggtcctgcagccttctcaggctccagcctacgctcaaaattaccgtcaattccatccatctccagtctcaaaccctccaaatatgtggtctcctcgctgaaaccactctacctagcaccgctagatggtccgcgcactgccgagcttaagtctcggagacagccacttgagttccgttgttctgcttctgctgctgatgacaaggagtcaaagactcaggtggtgccagttcagtcggaaggcgcacagaggttgaagatctccatctatttcgccacctggtgggcgcttaatgtgatatttaacatttacaacaagaaggttctcaatgcattcccttacccctggctcacctccacactctccctcgcctgtggctctgctatgatgcttttctcgtgggccacccgtcttgttgaggcccctaagaccgacctggacttctggaaagttcttttcccggttgctgtggcgcatacaattggccatgttgctgctacagtgagcatgtctaaggtggcagtgtcattcacacacataattaaaagcgcagaacctgcattcagtgttttggtgtcaaggttcttccttggggagacgtttccaattccagtatatctttctcttcttccaatcattggtggttgtgctctagctgctgtcacagagctgaactttaatatggttggatttatgggtgccatgatatccaaccttgcatttgttttccgcaacatcttctcgaagaggggcatgaaggggaagtccgtcagtggcatgaattactacgcttgcctgtcaattatgtccctggtcatactgactccatttgctatagctatggaaggccctcaaatgtgggctgctggttggcaaaaggctcttgcagaagttggacccaatgttgtctggtggattgctgcacagagcgtgttctaccacttatataaccaggtgtcctacatgtctctcgatcagatttctccattgacattcagcattggcaatacaatgaagcgtatatcagtgattgtttcatcaatcattatcttccacactcctgtccgcgctgtcaatgcactgggagctgccattgccatccttggcacattcctgtactctcaggcaaaggcgtga

SEQ ID NO: 320 - protein, 387 aa, Zea mays
MIPSVRLSPGPAAFSGSSLRSKLPSIPSISSLKPSKYVVSSLKPLYLAPLDGPRTAELKSRRQPLEFRCSASAADDKESKTQVVPVQSEGAQRLKISIYFATWWALNVIFNIYNKKVLNAFPYPWLTSTLSLACGSAMMLFSWATRLVEAPKTDLDFWKVLFPVAVAHTIGHVAATVSMSKVAVSFTHIIKSAEPAFSVLVSRFFLGETFPIPVYLSLLPIIGGCALAAVTELNFNMVGFMGAMISNLAFVFRNIFSKRGMKGKSVSGMNYYACLSIMSLVILTPFAIAMEGPQMWAAGWQKALAEVGPNVVWWIAAQSVFYHLYNQVSYMSLDQISPLTFSIGNTMKRISVIVSSIIIFHTPVRAVNALGAAIAILGTFLYSQAKA

SEQ ID NO: 321 - DNA, 1068 bp, Zea mays
  CDS (1)..(1068)
atgactcaagcgactacagcaaacttgctgagactgcagctgatcatggggtcgatgacatggttggcggccgtgctggcagcactcgtcgtcgccgcctcctcatcggtggcatcacacgcctcgccgccggggaaacttgaggtcggtttctacgagcactcgtgcccacaggccgaggacatcgtgcgcaacgccgtccgccgcggcatagcccgcgagcccggcgtcggcgcggggctcatccggatgcacttccacgactgcttcgtccggggctgcgacggctccatcctcatcaactccacgccgggcaacaaggccgagaaggattccgtggccaacaaccccagcatgcgcggcttcgacgtcatcgacgacgccaaggccgtcctcgaggcgcactgcccgcgcaccgtctcctgcgccgacatcgtcgcgttcgcggcccgtgacagcacctacctcgccggcggcctggactacaaggtcccgtcgggccgccgtgacggccgagtgtccaaagaggaggaggtgctcgacaacaatgtccctgccccgactgacgaggtcgacgagctcatcgagagcttcaagcgcaaggggctcaacgccgacgacatggtcacgctctctggcgcgcacaccatcgggcgctcccactgctcctcgttcacggagcgcctctacaacttcagcgggcagctggggcggacggacccgtccctcgaccctgcctacgctgagcacctcaagatgcgctgcccatggccgtccagcaacgaccagatggaccccacggtggtgccgcttgacccagtcacgtcggcgaccttcgacaaccagtactacaagaacgtgctggcgcacaaggtcctgttcatctccgacaacacactgctcgacaacccatggacggccggaatggtccacttcaacgccgcagtcgagaaggcatggcaggtcaagttcgccaaggccatggttaagatgggcaaggtccaggtgctcaccggcgatgagggagagatcagggaaaagtgcttcgccgtcaacccacactactga

SEQ ID NO: 322 - protein, 355 aa, Zea mays
MTQATTANLLRLQLIMGSMTWLAAVLAALVVAASSSVASHASPPGKLEVGFYEHSCPQAEDIVRNAVRRGIAREPGVGAGLIRMHFHDCFVRGCDGSILINSTPGNKAEKDSVANNPSMRGFDVIDDAKAVLEAHCPRTVSCADIVAFAARDSTYLAGGLDYKVPSGRRDGRVSKEEEVLDNNVPAPTDEVDELIESFKRKGLNADDMVTLSGAHTIGRSHCSSFTERLYNFSGQLGRTDPSLDPAYAEHLKMRCPWPSSNDQMDPTVVPLDPVTSATFDNQYYKNVLAHKVLFISDNTLLDNPWTAGMVHFNAAVEKAWQVKFAKAMVKMGKVQVLTGDEGEIREKCFAVNPHY

SEQ ID NO: 323 - DNA, 2190 bp, Zea mays
  CDS (1)..(2190)
atggacatccacaccaacccgtgctcaaggaaaaaaaaccggggcggcgaaaaccctcgaaccctaatccttacgcccctcatggcggacgctgatgcggcgctgccaacgccgcctccggaggtagtagcccccgaggagcatcccgtgggcgccgaatccaccgtcgccgcgccggccgaagtcgataacaagcggaagctagaggaggtcagcgccgacgcggaggtgaaaggcaccagcgaggacgccaagcgcccgcgcgtggacggcgagcccgacgccgcaacaggggttgagcagcaaatcgatgggtcctccgtgaatgcggatcccgcagctccggaggataaggctgctcttaacgttggcgcagcaatggatggtgataatgacacgcctgctcccgctcccgctccagactcgcaggcggtttctgacgagaagccgcttgaagcagcagctgaagctccacagcaggaaggtgatgcagcaactgctgtacaggagatttctcgtaagatcgaagtgcccaacagcaaggttggtgtcgttattggaaaagctggtgagacaatcaggaacttgcaaatcagctcgggtgcaaagatccaaatcaccaaggacatcgaagcggactcaaatgccctgactcggccggttgaactagttggaacacctggcagcgttgataaagctgagcagcttattaagagtgtcatagctgaggctgaggctggtggttcccctgccttaatagctagaggatttggaagtggacagcctggatcagagcaatttgagatgacagttcctgataacaaggtcggtctcattatcggaaaaggtggtgagacaattaaaggcatgcagaccaaatctggtgctcgtattcagttaataccccaacatcctccagagggtgttacattgactgaaagaattgtacgtgttactgggaataagaagcagattgaagctgcaaaggatttgatcaagcaagctatgaatcagacattttcaaagcatacaaatcattctggcggatatggtccacaaggttaccgacctcagggtcatggtgccgcttctcagttggggccacgctctcagaatcatggctatggatacccacctagaggtatgcctccacctcaaaactacaacgcaccctacggtggctacccaccgcagggaccgtcaagaggtggcatgggctgggaccagaggccgggcccaccaacccatccttcgtaccagggtggtggttctgactactacaagcagggatctcagccatatgatagccagccacccagctaccctcctgggccagggaattacaacagttatgggcaatcccagggccctaactatggccaacctcagtatccgcaacatgcacctcaacagaactacagccatggctatggtgatcctagatacaatgccccccctccgaaccagcagtactatggtcagccaccgatggccccgcagcaaggctatcctcaacagccagatccctatgctaggcctccatacagtggacctggtcaatggacccccaggggtgctcccgccgcagatggctcctaccaggcgccaccttcatcttatgggccaccgtctcagcaacctcctgcttatgggcaaacatatggtgcagcaacgggacctgatgggtatggtcaacagggttacccacagcagggtggccaggtaccagcttcatatggtcagagtgcaccagcagctccaggatatcctcagcaaggcacgcagcaaggtggctatgcacagtacccgcagacccaaccagcatatggtgatcaagcagctcaagccaatgcgaactatgggtaccagggagctccagcagatcccaactacggaagtgcgtacccacagcagccagggtatggtcctcctggtcaggcaactggtcaggctggttatgcatcctctgcgccagcggccagccagcctgtgtatggccaggctggatatacccagccacctacaaatcctccaagttatgatcagtctgcagcaccagcggcgactcagagcggttatgctgcgccccctgcaaatccacaacagcctgctgcagcaaaaggggtctcgccacagcctgctgctgctgctgctgctggatatggtgctagcgggcagtggacggcatga

SEQ ID NO: 324 - protein, 729 aa, Zea mays
MDIHTNPCSRKKNRGGENPRTLILTPLMADADAALPTPPPEVVAPEEHPVGAESTVAAPAEVDNKRKLEEVSADAEVKGTSEDAKRPRVDGEPDAATGVEQQIDGSSVNADPAAPEDKAALNVGAAMDGDNDTPAPAPAPDSQAVSDEKPLEAAAEAPQQEGDAATAVQEISRKIEVPNSKVGVVIGKAGETIRNLQISSGAKIQITKDIEADSNALTRPVELVGTPGSVDKAEQLIKSVIAEAEAGGSPALIARGFGSGQPGSEQFEMTVPDNKVGLIIGKGGETIKGMQTKSGARIQLIPQHPPEGVTLTERIVRVTGNKKQIEAAKDLIKQAMNQTFSKHTNHSGGYGPQGYRPQGHGAASQLGPRSQNHGYGYPPRGMPPPQNYNAPYGGYPPQGPSRGGMGWDQRPGPPTHPSYQGGGSDYYKQGSQPYDSQPPSYPPGPGNYNSYGQSQGPNYGQPQYPQHAPQQNYSHGYGDPRYNAPPPNQQYYGQPPMAPQQGYPQQPDPYARPPYSGPGQWTPRGAPAADGSYQAPPSSYGPPSQQPPAYGQTYGAATGPDGYGQQGYPQQGGQVPASYGQSAPAAPGYPQQGTQQGGYAQYPQTQPAYGDQAAQANANYGYQGAPADPNYGSAYPQQPGYGPPGQATGQAGYASSAPAASQPVYGQAGYTQPPTNPPSYDQSAAPAATQSGYAAPPANPQQPAAAKGVSPQPAAAAAAGYGASGQWTA

SEQ ID NO: 325 - DNA, 1122 bp, Zea mays
  CDS (1)..(1122)
atgaagcgagcgaggcagcggcgtggggcgaggagtggaggacaccgatccccgccggagagcgcgtccatcccaaatggcgactgcagcttcgcccgcctttccccgtctcctctgcctctgcctctccccctaacccccttccatttctccaccccaccccgctcccgcttccgcttcctcgccacctggttcgttccgcacccgccgccgcattgggtgccgagggggcacgcaatggagcagtacgagaaggtggagaagatcggggagggcacgtacggggtggtgtacaaggcgctggacaaggccaccaacgagacgatcgcgctcaagaagatccgcctcgagcaggaggacgagggcgtcccgtccaccgccatccgcgagatctctctcctcaaggagatgaaccacggcaacatcgtcagattacatgatgttgtccacagcgagaagcgcatatacctcgtcttcgagtacctggatctggacctcaagaagttcatggactcttgcccggagtttgctaagaatcccactttgattaagtcatacctctaccagatactccgtggtgttgcgtactgccattctcatagagttcttcaccgagatttgaaacctcagaacttgttgatagatcggcgtaataatgcactgaagcttgcagactttggtttagccagggcatttggaattcctgtccgtacatttactcatgaggtagtgacattatggtacagagctccagaaatccttcttggagcgagacagtattccacaccagttgacgtatggtctgtgggctgtatctttgcggaaatggtgaaccaaaagccactattccctggtgattctgagatcgacgaactgttcaagatattcagggtgctaggtacaccgaatgaacaaagttggcctggagtcagttgtttgcctgacttcaagactgctttccccaggtggcaagctcaggacctggcaacaatagtcccaaatctagaacctgctggcttggaccttctctctaaaatgcttaggtatgagccaagcaaaagaatcacagctaggcaagcacttgagcacgagtacttcaaggaccttgagatggtacagtga

SEQ ID NO: 326 - protein, 373 aa, Zea mays
MKRARQRRGARSGGHRSPPESASIPNGDCSFARLSPSPLPLPLPLTPFHFSTPPRSRFRFLATWFVPHPPPHWVPRGHAMEQYEKVEKIGEGTYGVVYKALDKATNETIALKKIRLEQEDEGVPSTAIREISLLKEMNHGNIVRLHDVVHSEKRIYLVFEYLDLDLKKFMDSCPEFAKNPTLIKSYLYQILRGVAYCHSHRVLHRDLKPQNLLIDRRNNALKLADFGLARAFGIPVRTFTHEVVTLWYRAPEILLGARQYSTPVDVWSVGCIFAEMVNQKPLFPGDSEIDELFKIFRVLGTPNEQSWPGVSCLPDFKTAFPRWQAQDLATIVPNLEPAGLDLLSKMLRYEPSKRITARQALEHEYFKDLEMVQ

SEQ ID NO: 327 - DNA, 777 bp, Zea mays; identical to SEQ ID NO: 211
  CDS (1)..(777)

SEQ ID NO: 328 - protein, 258 aa, Zea mays; identical to SEQ ID NO: 212

SEQ ID NO: 329 - DNA, 1701 bp, Zea mays
  CDS (1)..(1701)
atggctccgcttctcgctgctgccatgaaccacgctgcagcccatcctggccttaggagccacctagtaggacccaacaatgagagtttctcacggcaccacctgccgtcttcttctccacagagcagcaagcgaaggtgtaaccttagctttactacacgatctgcaagagtaggcagccaaaatggagtccaaatgttgagcccctcggaaatcccacaaagggactggttcccctctgacttcaccttcggtgccgccacttcagcgtaccaaattgaaggtgcttggaatgaagatggaaagggggaaagcaactgggatcacttctgccacaatcatccggaaaggatactggacgggagcaattcagacattggagcgaattcgtaccatatgtacaaaacggacgtcagattgctcaaggaaatgggcatggacgcatataggttctctatctcttggcccagaatactgccgaagggaaccaaagaaggaggtattaacccggatggcatcaagtactacagaaacctcatcaacttgttgctggaaaacggcatagagccatatgtaacaattttccactgggatgtacctcaagcactagaagagaagtacggcggcttcctagataagagtcataagagcattgtagaagattacacctacttcgctaaggtgtgctttgataacttcggcgacaaggtgaagaattggttgacctttaatgagccccagacatttacttccttttcctacggaactggggtctttgccccagggcggtgctcacctggactagactgtgcctacccaactgggaattcactcgtcgagccttacactgctggccataacattctcctagcccacgctgaggctgttgatctttacaacaagcattacaagcgcgacgacacccgcatagggcttgcgtttgacgtaatgggtcgtgtgccatacggaacatcgtttctggataaacaggccgaagaaaggtcatgggacatcaacctaggatggttcttagagccagtggttcgtggtgactaccccttctccatgagatcattggctagggaacgactacccttcttcaaggacgagcagaaggagaagctcgccggttcctataacatgttggggttaaactactacacctcacggttctccaaaaacatcgacatctcaccaaactactcacctgtgctcaacactgacgacgcctacgccagtcaagaagttaacgggcctgacgggaagcccattggtcctcctatgggaaatccatggatctacatgtaccctgagggcttgaaggatctccttatgataatgaagaacaaatacggaaacccacctatctacatcaccgagaacggaatcggggatgttgataccaaagagacacctctacccatggaggctgccttaaatgactacaaaaggctagattacatccagcgccacatcgctactcttaaggaatcaatagacttgggatcaaatgtgcaaggctacttcgcttggtctctgctggacaactttgaatggttcgccggcttcaccgaacgttatggcattgtctacgtcgaccgcaacaataactgcacgcgctacatgaaggagtctgccaagtggttgaaacagttcaacgccgcgaagaagcccagcaagaagattcttacgccagcttga

SEQ ID NO: 330 - protein, 566 aa, Zea mays
MAPLLAAAMNHAAAHPGLRSHLVGPNNESFSRHHLPSSSPQSSKRRCNLSFTTRSARVGSQNGVQMLSPSEIPQRDWFPSDFTFGAATSAYQIEGAWNEDGKGESNWDHFCHNHPERILDGSNSDIGANSYHMYKTDVRLLKEMGMDAYRFSISWPRILPKGTKEGGINPDGIKYYRNLINLLLENGIEPYVTIFHWDVPQALEEKYGGFLDKSHKSIVEDYTYFAKVCFDNFGDKVKNWLTFNEPQTFTSFSYGTGVFAPGRCSPGLDCAYPTGNSLVEPYTAGHNILLAHAEAVDLYNKHYKRDDTRIGLAFDVMGRVPYGTSFLDKQAEERSWDINLGWFLEPVVRGDYPFSMRSLARERLPFFKDEQKEKLAGSYNMLGLNYYTSRFSKNIDISPNYSPVLNTDDAYASQEVNGPDGKPIGPPMGNPWIYMYPEGLKDLLMIMKNKYGNPPIYITENGIGDVDTKETPLPMEAALNDYKRLDYIQRHIATLKESIDLGSNVQGYFAWSLLDNFEWFAGFTERYGIVYVDRNNNCTRYMKESAKWLKQFNAAKKPSKKILTPA

SEQ ID NO: 331 - DNA, 867 bp, Zea mays
  CDS (1)..(867)
atgggcgcttttctgctcttcgtctgtctcctggcgccggtcgtcgtgctcgcctgcgccgtccgcggcaggaagcggcgggcgtcctccgcggcggcgggcggcaaggcgctgccgctgccgcccgggtcgatggggtggccgtacgtgggcgagacgttccagctctactcgtccaagaaccccaacgtgttcttcgcccggaagcagaaccggtacgggccaatcttcaagacgcacatcctgggctgcccctgcgtgatggtgtccagcccggaggcggcgcgcttcgtgctcgtcacgcaggcccacctcttcaagcccaccttcccggcgagcaaggagcgcatgctggggccgcaggccatcttcttccagcagggcgactaccacgcccacctccgccgcctcgtctcccgggctttctcccccgaggccatccgcggctccgtgccggccatcgaggccatcgcgctgcgctcgctcgagtcctgggacggccgcctcgtcaacaccttccaagagatgaagctggtgggttggcttggcttggctatgcggctatactctgttatgctctgttctttcctccatcctcagttgctcatcctgttcatcttccgcgccgcgccgcctgcagtacgcgctgaatgtggcattgctgtccatcttcggcgaggaagagatgcggtacatagaggagctgaagcagtgctacctgaccctggagaaggggtacaactcgatgcccgtgaacctgccgggcaccctgttccacaaggccatgaaggcccgcaagcgcctgggcgccgtcgtggcccacatcatcgaggcccggcgcgagggcgagcggcagcgcgggagtga

SEQ ID NO: 332 - protein, 288 aa, Zea mays
MGAFLLFVCLLAPVVVLACAVRGRKRRASSAAAGGKALPLPPGSMGWPYVGETFQLYSSKNPNVFFARKQNRYGPIFKTHILGCPCVMVSSPEAARFVLVTQAHLFKPTFPASKERMLGPQAIFFQQGDYHAHLRRLVSRAFSPEAIRGSVPAIEAIALRSLESWDGRLVNTFQEMKLVGWLGLAMRLYSVMLCSFLHPQLLILFIFRAAPPAVRAECGIAVHLRRGRDAVHRGAEAVLPDPGEGVQLDAREPAGHPVPQGHEGPQAPGRRRGPHHRGPARGRAAARE

SEQ ID NO: 333 - DNA, 627 bp, Zea mays
  CDS (1)..(627)
atgggcacgaggcgactcccaaccgccggttggctttgctgctccgagctcttcctcttccacacccgccctctctcttgggtcggcggccgagtgtctgcgtcgtccacggagatcagggatcggcggcggggtatggcgagggagcgacgggagataaagaggatagagagcgcggcggcgcggcaggtcacgttctccaagcgccgccgcggcctcttcaagaaggctgaggagctctccgtgctgtgcgatgccgacgtcgcgctcatcgtcttctcctccacgggaaagctctcccagttcgccagctccagtatgaatgagatcattgacaagtacagcacacattctaaaaacctggggaaagcagaacagccttcacttgacttgaacttagaacatagcaaatatgcaaatttgaatgagcaacttgtggaagcaagccttcgactcaggcagatgagaggtgaagaacttgagggattgagtgttgaagaactccagcaattggagaagaatctggaatctggtctgcatagggtgcttcaaacacaggatcaacaattcttggaacagatcagcgacctcgaacataagagtacacaactggcacaggagaactga

SEQ ID NO: 334 - protein, 208 aa, Zea mays
MGTRRLPTAGWLCCSELFLFHTRPLSWVGGRVSASSTEIRDRRRGMARERREIKRIESAAARQVTFSKRRRGLFKKAEELSVLCDADVALIVFSSTGKLSQFASSSMNEIIDKYSTHSKNLGKAEQPSLDLNLEHSKYANLNEQLVEASLRLRQMRGEELEGLSVEELQQLEKNLESGLHRVLQTQDQQFLEQISDLEHKSTQLAQEN

SEQ ID NO: 335 - DNA, 816 bp, Zea mays
  CDS (1)..(816)
atgagatggggaatggcttggccaagcacctttgccaaggtttaccatgctcgtaacacggcgacttcggaaagtgtcgcgatcaaagtgattgataaggagaaggttatgaaggttggtctcattgatcaaatccagcgagaaatttctgtgatgaagcttgttaggcatccaaacatcgtacagctctatgaggtcatggccaccaaaaccaaaatatactttgtgctggaacatgttaaaggtggagagctgttcaacaagattcagcgaggaaggctcaaggaagacgcagcgaggaagtacttccagcagttgatctgtgcggtggacttctgccacagcaggggtgtctatcatcgagatttgaagccagaaaatcttttgctcgatgagaatagcaacctaaaggtatcagattttggtctaagcgcacttgctgaatgccatagacaagacggcctgctccacacgacttgtggcacgcctgcttatgttgccccagaggtgattaacagaaagggttatgatggtgcaaaggctgacatatggtcttgtggggtcatcctgtttgtgctattggctggttatcttccgttccatgataagaacttgatggacatgtataagaagattgagaaagctgacttcaaatgtccaagttggttttctaccgatgttcggaggcttttgcaaaggattcttgatcctaaccctagtagaaggatctcgatggaaaaaatcatggagaatccatggtttaggaagggtttaggtgcaaagctacttagatacgatttacagaataagaattga

SEQ ID NO: 336 - protein, 271 aa, Zea mays
MRWGMAWPSTFAKVYHARNTATSESVAIKVIDKEKVMKVGLIDQIQREISVMKLVRHPNIVQLYEVMATKTKIYFVLEHVKGGELFNKIQRGRLKEDAARKYFQQLICAVDFCHSRGVYHRDLKPENLLLDENSNLKVSDFGLSALAECHRQDGLLHTTCGTPAYVAPEVINRKGYDGAKADIWSCGVILFVLLAGYLPFHDKNLMDMYKKIEKADFKCPSWFSTDVRRLLQRILDPNPSRRISMEKIMENPWFRKGLGAKLLRYDLQNKN

SEQ ID NO: 337 - DNA, 921 bp, Zea mays
  CDS (1)..(921)
  misc_feature (4)..(864): n at positions 4, 5, 62, and 864 is a or g or c or t/u
atgnngcgcaagcacgtacgttgtcggaagctcaagttagaagaagcaccagtgcctgatcngatggcggcccaggctctcctctccggccggcagctgctgggccgccccgtgcagtcggccgtctctaggtcgtcggcgaggaaggcgcccttcgtcgtcagggccagctccagccctccagccaagcaaggtgccgacaggcagctgtggttcgcgtccaagcagtccctctcctacctcgatggcacgctgcccggcgactatggcttcgacccgctgggcctctcggacccggagggcaccgggggcttcatcgagcccaagtggctggcctatggcgaggtgatcaacggccgctacgccatgctgggcgcggtgggcgccatcgccccggagatcttcggcaagatgggcatcatccccccggagaccgcgctgccgtggttcaagacgggcgtcatcccgcccgcgggcacctacaactactgggccgactcctacacgctcttcgtcttcaacatggcgctcatgggcttcgccgagcaccgccgcctccaggactggtacaacccgggctccatgggcaagcagtacttcctcggcctcgagaagttcctcgccggctccggcgacccgtcctaccccggcgggcccctcttcaacccgctcggcttcggcaagaccgagaaggagatgaatgagctcaagctcaaggagatcaagaacggcaggctcgccatgctcgccatcctcggttacttcatccaggggctcgtcaccggcgtcggcccgttccagaacctgctcgaccacctcgccgaccccgtcaacaacaacgtgctcaccagcctcaagttccanctagaacgtggtgcatcagcatacctgctgctgccgccgccgccgccagttgtttga

SEQ ID NO: 338 - protein, 306 aa, Zea mays
  misc_feature (2)..(2): Xaa can be any amino acid
  misc_feature (21)..(21): Xaa can be Arg or Gln or Leu or Pro
  misc_feature (288)..(288): Xaa can be Gln or His
MXRKHVRCRKLKLEEAPVPDXMAAQALLSGRQLLGRPVQSAVSRSSARKAPFVVRASSSPPAKQGADRQLWFASKQSLSYLDGTLPGDYGFDPLGLSDPEGTGGFIEPKWLAYGEVINGRYAMLGAVGAIAPEIFGKMGIIPPETALPWFKTGVIPPAGTYNYWADSYTLFVFNMALMGFAEHRRLQDWYNPGSMGKQYFLGLEKFLAGSGDPSYPGGPLFNPLGFGKTEKEMNELKLKEIKNGRLAMLAILGYFIQGLVTGVGPFQNLLDHLADPVNNNVLTSLKFXLERGASAYLLLPPPPPVV

SEQ ID NO: 339 - DNA, 1164 bp, Zea mays
  CDS (1)..(1164)
atgataccttccgtgaggctctctcctggtcctgcagccttctcaggctccagcctacgctcaaaattaccgtcaattccatccatctccagtctcaaaccctccaaatatgtggtctcctcgctgaaaccactctacctagcaccgctagatggtccgcgcactgccgagcttaagtctcggagacagccacttgagttccgttgttctgcttctgctgctgatgacaaggagtcaaagactcaggtggtgccagttcagtcggaaggcgcacagaggttgaagatctccatctatttcgccacctggtgggcgcttaatgtgatatttaacatttacaacaagaaggttctcaatgcattcccttacccctggctcacctccacactctccctcgcctgcggctctgcgatgatgcttttctcgtgggccacccgtcttgttgaggcccccaagaccgacctagacttctggaaagttcttttcccggttgctgtggcacatacaattggccatgttgctgcgacagtgagcatgtctaaggtggcagtgtcattcacacacataattaaaagcgcagaacctgcattcagtgttttggtgtcaaagttcttccttggggagacgtttccaattccagtatatctttctcttcttccaatcattggtggttgtgctctagctgctgtcacagagctgaactttaatatggttggatttatgggtgccatgatatccaaccttgcatttgttttccgcaacatcttctcgaagaggggcatgaaggggaagtccgtcagtggcatgaattactacgcttgcctgtcaattatgtccctggtcatactgactccatttgctatagctatggaaggccctcaaatgtgggctgctggttggcaaaaggctcttgcagaagttggacccaatgttgtctggtggattgctgcacagagcgtgttctaccacttatataaccaggtgtcctacatgtctctcgatcagatttctccattgacattcagcattggcaatacaatgaagcgtatatcagtgattgtttcatcaatcattatcttccacactcctgtccgcgctgtcaatgcactgggagctgccattgccatccttggcacattcctgtactctcaggcaaaggcgtga

SEQ ID NO: 340 - protein, 387 aa, Zea mays
MIPSVRLSPGPAAFSGSSLRSKLPSIPSISSLKPSKYVVSSLKPLYLAPLDGPRTAELKSRRQPLEFRCSASAADDKESKTQVVPVQSEGAQRLKISIYFATWWALNVIFNIYNKKVLNAFPYPWLTSTLSLACGSAMMLFSWATRLVEAPKTDLDFWKVLFPVAVAHTIGHVAATVSMSKVAVSFTHIIKSAEPAFSVLVSKFFLGETFPIPVYLSLLPIIGGCALAAVTELNFNMVGFMGAMISNLAFVFRNIFSKRGMKGKSVSGMNYYACLSIMSLVILTPFAIAMEGPQMWAAGWQKALAEVGPNVVWWIAAQSVFYHLYNQVSYMSLDQISPLTFSIGNTMKRISVIVSSIIIFHTPVRAVNALGAAIAILGTFLYSQAKA

SEQ ID NO: 341 - DNA, 777 bp, Zea mays
  CDS (1)..(777)
  misc_feature (48)..(723): n at positions 48, 58, 640, 690 and 723 is a or g or c or t/u
atgcactggccgccggttttctccagctggagagccattcgtgggcgnaggacgaganagaggatcggcggcggcggcgtgtgggagatggcgcgcgagaggcgggagatacggcggatagagagcgcggcggcgcggcaggtgaccttctccaagcgccggcgcgggctgttcaagaaggcggaggagctcgccgtgctgtgcgacgccgacgtcgcgctcgtcgtgttctccgccaccggcaggctctcgcagttcgcgagctccagtgtgaatgacatcgttgacaagtacagtacacattctaagaatctggggaaatcacatcagcagccttctattgatttgaatgtagagcagagcaaatacagcggcttgaacgagcaacttgctgaagaaactaatggacttagacagatgagaggtgaagaccttgagggattgagtgtagaggaattgcaccgaatggaaaggaaacttgaagcaggactgcatagagtgattagtacaaaggaccagctattcatgcaacaaatcggcgaattactgcaaaagggcacacagctagaagatgagaacaggcgtctaaaagaacaagtaacagaccgtatatatatatttctctatatatgtagtgccnaggacttcggttgtaacaaaccgtataatgaggaggacgtttataattcncttattctttataagcagatgcctcaggtgctnacggctggcacaattaatggtggttgctgctgctgcagaaaatatcctcactga

SEQ ID NO: 342 - protein, 258 aa, Zea mays
  misc_feature (20)..(20): Xaa can be any amino acid
  misc_feature (214)..(214): Xaa can be any amino acid
MHWPPVFSSWRAIRGRRTRXRIGGGGVWEMARERREIRRIESAAARQVTFSKRRRGLFKKAEELAVLCDADVALVVFSATGRLSQFASSSVNDIVDKYSTHSKNLGKSHQQPSIDLNVEQSKYSGLNEQLAEETNGLRQMRGEDLEGLSVEELHRMERKLEAGLHRVISTKDQLFMQQIGELLQKGTQLEDENRRLKEQVTDRIYIFLYICSAXDFGCNKPYNEEDVYNSLILYKQMPQVLTAGTINGGCCCCRKYPH

SEQ ID NO: 343 - DNA, 585 bp, Zea mays
  CDS (1)..(585)
atgactctctccctcctaccacacacagcctccggactgctccggacgcgcgcctcagatctactccaacacctccgcagcggcggcgcccgcgggtggaggagcaggagaggcggcgccatggtcgggaccgggaagagggagcggatagcgatacggaggatcgacaacctggcggccaggcaggtgaccttctccaagaggcggcggggcctgttcaagaaggccgaggagctctccatcctctgcgacgccgaggtcggccttgtcgtcttctccgccaccggcaaactcttccacttcgccagctccagcatgaagcaggtaatcgatcggtacgactctcattccaagactctccagaggtccgaaccgcagtcgtctcaactgcagtcacatatggatgacggcacttgtgcaaggctaaaggaggaacttgctgaaacaagccttaagctcaggcagatgagaggagaggagctccagaggctgagcgtcgaacagctgcaggagctcgagaagaccctcgaatccggcctcggctctgtactcaaaaccaagagccaaaaaatccttgacgagtga

SEQ ID NO: 344 - protein, 194 aa, Zea mays
MTLSLLPHTASGLLRTRASDLLQHLRSGGARGWRSRRGGAMVGTGKRERIAIRRIDNLAARQVTFSKRRRGLFKKAEELSILCDAEVGLVVFSATGKLFHFASSSMKQVIDRYDSHSKTLQRSEPQSSQLQSHMDDGTCARLKEELAETSLKLRQMRGEELQRLSVEQLQELEKTLESGLGSVLKTKSQKILDE

SEQ ID NO: 345 - DNA, 816 bp, Zea mays
  CDS (1)..(816)
  misc_feature (4)..(142): n at positions 4, 80, and 142 is a or g or c or t/u
atgnccggcaagcaaacatctccggcagccatggcgtccactgtaacagccgccaatagcagccatggaagcgccctgcngtacccgtaccgcctccccaaggccggtcgcgggctggagctgcagacgcacgctttccacngcctgcacaccaccaccacgcgcaggtcgtcacccagagctcgggttgtcgccgtccgagccgccggcactcagcgggcgacctggttgcccggactggacccgcccccatacctcgacggcacactaccaggtgacttcggcttcgaccccctgggcctcggcgaggagcccgaagccttgaagtggtacgttcaggccgagctcgtgcactgccggttcgccatggcaggggtcgccggcatccttttcactgacttgctccgcgtatcagggaacagcgacctccccgtgtggttcgaagcaggcgcggcgaaattcgacttcgcgaacacaacggcgctcttcttcgtccagctcttcttgatggggttcgctgaaaccaagaggtacatggacttcaaaaatccaggatcgcaagcagaggaagggacattcatagggttagaggctgcactcgcaggtcaacagccaggctaccccgggggcccactgttcaatccactaggactcgcaaaggatatagagaatgctcatgacgagaagctcaaagaaatcaagaacgggaggttggcaatggtagccatgcttggcttcatggtgcaagcatccgtaactcatgccggccccatcgacaatctcttgacacacctttcggacccgttcaacaaatga

SEQ ID NO: 346 - protein, 271 aa, Zea mays
  misc_feature (2)..(2): Xaa can be Thr or Pro or Ala or Ser
  misc_feature (27)..(27): Xaa can be Arg or Gln or Leu or Pro
  misc_feature (48)..(48): Xaa can be Ser or Arg or Gly or Cys
MXGKQTSPAAMASTVTAANSSHGSALXYPYRLPKAGRGLELQTHAFHXLHTTTTRRSSPRARVVAVRAAGTQRATWLPGLDPPPYLDGTLPGDFGFDPLGLGEEPEALKWYVQAELVHCRFAMAGVAGILFTDLLRVSGNSDLPVWFEAGAAKFDFANTTALFFVQLFLMGFAETKRYMDFKNPGSQAEEGTFIGLEAALAGQQPGYPGGPLFNPLGLAKDIENAHDEKLKEIKNGRLAMVAMLGFMVQASVTHAGPIDNLLTHLSDPFNK

SEQ ID NO: 347 - DNA, 1314 bp, Zea mays
  CDS (1)..(1314)
  misc_feature (269)..(269): n at position 269 is a or g or c or t/u
atgtccattttgccccctcgctcttcacttcctccgctccgcttgttgtctccttccctagggtttgtccagctccgcgctcagcctcgctcgctagctcccgctctcctcgatcccgcggccccgatcagcgcgatctccgcgcggccatggtctccggcgcggcgcacaacccgggcgggggcgccgccgcccagaccacccagcgctcgccgccgcagctgggggcccggacggccctcgccacgccgccgccggtctccgggcgngccgcgcactccgcgtctactagcggcggcaccgctggttcaccaccgtccagccgcagcgagcagcacgcccccgacggtgctgtcaagggtcccgccctcgcgcgctgcgcccgcagcggcggcggcggcgtccacgcccgccagcgacagcacgttcctccgcttgaataatctcgacatcaacggcgacgacgcgccgtcgtcgcaggctcccacgagcaagaagaaaaggagaggcacacgggcagtgggtcctgataaaggaaaccggggactgcgccagtttagtatgaaagtttgtgagaaagttgaaagtaaagggagaacaacatataatgaggtggcagatgaacttgttgctgagtttacagaccccaataataatattgaggcaccagaccctgataaccctaatgcgcaacaatatgatgaaaaaaatatacgacgaagagtttatgatgctttaaatgttctgatggctatggacattatatctaaagataaaaaggagatccagtggaagggcttgccgcggactagtataagtgacattgaagaaatgaagacggagcttgtgggactgaaaggtagaattgaaaagaaaagtgcttacctacaggagctacaagaccaatatgtaggtctgcaaaacctgattcaacgaaatgaacagtcatatggttcaggaaacacgccttctggtggagtggctttgccatttatcctagttcagacccgacctcatgctaccgtggaagttgagatatcagaagatatgcagctggtgcattttgacttcaatagcaccccattcgagctgcacgacgactcatacgtcctaaaagaaatgcgattctgtggaagagaacaacatgacagcactcaagagtcgatatcaaatggaggtgagagctcaagcgtgtcaaatatttattggcaacacgtacagcatgtggaaaggccaaacaatggcacaggtaggttaccgagctcaccgcctattccagggatcttgaaagggcgtgcgaagcacgagcactga

SEQ ID NO: 348 - protein, 437 aa, Zea mays
  misc_feature (90)..(90): Xaa can be Ala or Glu or Gly or Val
MSILPPRSSLPPLRLLSPSLGFVQLRAQPRSLAPALLDPAAPISAISARPWSPARRTTRAGAPPPRPPSARRRSWGPGRPSPRRRRSPGXPRTPRLLAAAPLVHHRPAAASSTPPTVLSRVPPSRAAPAAAAAASTPASDSTFLRLNNLDINGDDAPSSQAPTSKKKRRGTRAVGPDKGNRGLRQFSMKVCEKVESKGRTTYNEVADELVAEFTDPNNNIEAPDPDNPNAQQYDEKNIRRRVYDALNVLMAMDIISKDKKEIQWKGLPRTSISDIEEMKTELVGLKGRIEKKSAYLQELQDQYVGLQNLIQRNEQSYGSGNTPSGGVALPFILVQTRPHATVEVEISEDMQLVHFDFNSTPFELHDDSYVLKEMRFCGREQHDSTQESISNGGESSSVSNIYWQHVQHVERPNNGTGRLPSSPPIPGILKGRAKHEH

SEQ ID NO: 349 - DNA, 1056 bp, Zea mays
  CDS (1)..(1056)
atggacagcgactacgttgccagcctgctcatgggcatgggctcatccgcccctgcgctcgacttcgccgcgctggacgccgggttcctcgaaacgctctgcggcggcggcggcggcctcttcggggtgtccggggtcgccgcgggggccgggtgtggcggcgtgtccccggaggggtcgtcggtgtccgacccggcgtgggcgcgcgccaagggcgatgacaatgtcaggaagcgcaaggcgccgcccacggggtccgccggcggcaaggaagcctgcccgggcaaggctgcggaggccaagggtccggacgggaagaggtgcagagtgggcggcagcgacagcccggtgaagccgaaggtagaggaggtggcggcgagcgacgcctcggttgaactcaaagcgcagaagaagggcaaggggaagaccgccaagccggcagtcgaaccgcccaaggactacgtccatgtccgggcgcggcgagggcaggcgactgacagccacagcctcgcagagagggttagaagagagaagatcagccagaggatgaagtttctgcaggacctagtgccaggatgcaacaaggtggttggcaaggcactcatgctcgatgagatcataaactacgtccagtctctgcagcagcaagtcgagttcctgtccatgaagctcgccactgtgaacccagagcttgatttcagcaacctatcgacactcctgcacaaagacatgtaccaacagccatgtggtggcccttcggcaagttcggtctttccactggaaagcgccggcgcagcttttccattctgcgagcaggcggatcttttccacagctttggctcgggtggtagcggtagcggtagtggtatggaggatcagtgctctctaagcctgctgctagacacggctctgccccacgcggccagcccacagtttgcttttcaaaagcagcaaagggacttgtgggaggatggcctacagcatgctttgcctacccctactaccggtagcgagcaaaggcaggaggaggatgggcttttagtacccgacctttga

SEQ ID NO: 350 - protein, 351 aa, Zea mays
MDSDYVASLLMGMGSSAPALDFAALDAGFLETLCGGGGGLFGVSGVAAGAGCGGVSPEGSSVSDPAWARAKGDDNVRKRKAPPTGSAGGKEACPGKAAEAKGPDGKRCRVGGSDSPVKPKVEEVAASDASVELKAQKKGKGKTAKPAVEPPKDYVHVRARRGQATDSHSLAERVRREKISQRMKFLQDLVPGCNKVVGKALMLDEIINYVQSLQQQVEFLSMKLATVNPELDFSNLSTLLHKDMYQQPCGGPSASSVFPLESAGAAFPFCEQADLFHSFGSGGSGSGSGMEDQCSLSLLLDTALPHAASPQFAFQKQQRDLWEDGLQHALPTPTTGSEQRQEEDGLLVPDL

SEQ ID NO: 351 - DNA, 720 bp, Zea mays
  CDS (1)..(720)
  misc_feature (540)..(716): n at positions 540, 569, 716 is a or g or c or t/u
atgcgcgggaaggtgcagctgaagcggatcgagaacaagatcaaccgccaggtgaccttctccaagcgccgctcggggctgctcaagaaggcgcacgagatctccgtgctctgcgacgccgaggtcgcgctcatcatcttctccaccaaagggaaactctacgagtattccaccgattcatgtatggacaaaattcttgaccggtacgagcgctactcctatgcagaaaaggttcttatttcagcagaatctgaaactcagggcaattggtgccacgagtatagaaaactaaaggcgaaggtcgagacaatacaaaaatgtcaaaagcacctcatgggagaggatcttgaaacgttgaatctcaaagagcttcagcaactagagcagcagctggagagttcactgaaacatatcagaaccaggaagaaccaacttatgctcgagtcaatttcggagctccaacggaaggagaagtcgctgcaggaggagaacaaggttctgcagaaggagctcgcggagaagcagaaagcccagcggaancaagtgcaatggggccaaacccaacagcngaccagttcgtcttcctcgtgcttcgtgataagggaagctgccccaacaacaaatatcagcatttttcctgtggcagcaggcgggaggttggtggaaggtgcagcagcgcagccacaggctcgcgttggactaccaccatggatgcnttga

SEQ ID NO: 352 - protein, 239 aa, Zea mays
  misc_feature (180)..(180): Xaa can be Lys or Asn
  misc_feature (190)..(190): Xaa can be Arg or Gln or Leu or Pro
  misc_feature (239)..(239): Xaa can be His or Pro or Arg or Leu
MRGKVQLKRIENKINRQVTFSKRRSGLLKKAHEISVLCDAEVALIIFSTKGKLYEYSTDSCMDKILDRYERYSYAEKVLISAESETQGNWCHEYRKLKAKVETIQKCQKHLMGEDLETLNLKELQQLEQQLESSLKHIRTRKNQLMLESISELQRKEKSLQEENKVLQKELAEKQKAQRXQVQWGQTQQXTSSSSSCFVIREAAPTTNISIFPVAAGGRLVEGAAAQPQARVGLPPWMX

SEQ ID NO: 353 - DNA, 1350 bp, Zea mays; identical to SEQ ID NO: 221
  CDS (1)..(1350)

SEQ ID NO: 354 - protein, 449 aa, Zea mays; identical to SEQ ID NO: 222

SEQ ID NO: 355 - DNA, 756 bp, Zea mays
  CDS (1)..(756)
  misc_feature (731)..(731): n at position 731 is a or g or c or t/u
atgaacgccggtgacgagcccctggatgaagtaaccgaggatggcgagcatggcgagcctgccgttcttgatctccttgagcttgagctcattcatctccttctcggtcttgccgaagccgagcgggttgaagaggggcccgccggggtaggacgggtcgccggagccggcgaggaacttctcgaggccgaggaagtactgcttgcccatggagcccgggttgtaccagtcctggaggcggcggtgctcggcgaagcccatgagcgccatgttgaagacgaagagcgtgtaggagtcggcccagtagttgtaggtgcccgcgggcgggatgacgcccgtcttgaaccacggcagcgcggtctccggggggatgatgcccatcttgccgaagatctccggggcgatggcgcccaccgcgcccagcatggcgtagcggccgttgatcacctcgccgtaggccagccacttgggctcgatgaagcccccggtgccctccgggtccgagaggcccagcgggtcgaagccatagtcgccgggcagcgtgccatcgaggtaggagagggactgcttggacgcgaaccacagctgcctgtcggcaccttgcttggctggagggctggagctggccctgacgacgaagggcgccttcctcgccgacgacctagagacggccgactgcacggggcggcccagcagctgccggccggagaggagagcctgggccgccatcngatcaggcactggtgcttcttctga

SEQ ID NO: 356 - protein, 251 aa, Zea mays
  misc_feature (244)..(244): Xaa can be Arg or Gln or Leu or Pro
MNAGDEPLDEVTEDGEHGEPAVLDLLELELIHLLLGLAEAERVEEGPAGVGRVAGAGEELLEAEEVLLAHGARVVPVLEAAVLGEAHERHVEDEERVGVGPVVVGARGRDDARLEPRQRGLRGDDAHLAEDLRGDGAHRAQHGVAAVDHLAVGQPLGLDEAPGALRVREAQRVEAIVAGQRAIEVGEGLLGREPQLPVGTLLGWRAGAGPDDEGRLPRRRPRDGRLHGAAQQLPAGEESLGRHXIRHWCFF

SEQ ID NO: 357 - DNA, 780 bp, Zea mays
  CDS (1)..(780)
  misc_feature (54)..(767): n at positions 54, 741, and 767 is a or g or c or t/u
atgggggaaaaccgtttgcagaagtcaatcataaccaggggaatatcgccatcnattggagcattcactgtccaatgtgctaaatgttttaaatggaggcttattccaacgaaagagaagtatgaagaaattcgtgaacgtattatagaggaaccttttgtatgcaaaagagctcgtgaatggagacctgatgtaacatgcaatgacccagaagatatatctcaggatggtagcaggctttgggctattgacaaacccaatattgcacaaccccctcgcggatgggaaaggcagattaggataagaggtgaagggggtaccaaatttgctgatgtatactatacctctcctactggaaggaaacttaggtctctggttgaagtcgataggttcctccaagagaatccggagtatggtgctcagggtgtaactttagctcagttttcgttccagatacctagacctctacggcaggactatgtgaaaaagaaaccgaagttgataaatccaagtgatgaagcaagtatgattgcctctaagtcttttcaaccagaagaagtgaaacccatagcctgggcagttgctacaaaacacgagggcgatgccagtgaagaagcttctctcaccgatgaggcacctacatcagaagtcatgctagcccggaagagaaaagcaggaagctctttgtcggtagagccaaaccatctctctgatgaacttgaaccaaagctggaggatgcnttagaacggggagacgtctacctganaagtaaaagttga

SEQ ID NO: 358 - protein, 259 aa, Zea mays
  misc_feature (256)..(256): Xaa can be Lys or Thr or Arg or Ile
MGENRLQKSIITRGISPSIGAFTVQCAKCFKWRLIPTKEKYEEIRERIIEEPFVCKRAREWRPDVTCNDPEDISQDGSRLWAIDKPNIAQPPRGWERQIRIRGEGGTKFADVYYTSPTGRKLRSLVEVDRFLQENPEYGAQGVTLAQFSFQIPRPLRQDYVKKKPKLINPSDEASMIASKSFQPEEVKPIAWAVATKHEGDASEEASLTDEAPTSEVMLARKRKAGSSLSVEPNHLSDELEPKLEDALERGDVYLXSKS

SEQ ID NO: 359 - DNA, 747 bp, Zea mays
  CDS (1)..(747)
atgaagttcatgaagcttggatcgaatccggatacctttcaggacgatgggaatgaagtcagtattgcggcatctgaattggtgagcgacatcactgttcgtatagggactacaaagttttaccttcacaagtttccgctcctctccaagtgtgctcgctttcagaagttgattccaaccactggtgatgaaaatattgagatccacatccatgatattcctggtggcgcaaaggcttttggggtctgtgccaagttttgctacggcatgattgtcacactcaatgcctacaatgtgattgcagcccgctgtgctgcagagtacttggagatgaatgagactgttgacaagggcaatctgatctacaagattgatgtcttcctcagctcaagcatattccggagctggaaagactctattattgttcttggtacaacaaaggctcatctaccttgggcagaggatcttaagctggttagccaatgcattgactctgttgcttcaaaagcctctatcgacgtttcaaaagttgaatggtcatacacatacaatcggaagaagctcccaactgagaatggtcatgattcgccgtggaatggagtcaaccagcggcaggttgttccgaaggattggtgggtagaagatctgacggatctcgacattgatgcctacaagcaagtcataacagcagtcaaaaccaagggtatggtggcccaaggacgtgatcgtgaggcaattaaagcctga

SEQ ID NO: 360 - protein, 248 aa, Zea mays
MKFMKLGSNPDTFQDDGNEVSIAASELVSDITVRIGTTKFYLHKFPLLSKCARFQKLIPTTGDENIEIHIHDIPGGAKAFGVCAKFCYGMIVTLNAYNVIAARCAAEYLEMNETVDKGNLIYKIDVFLSSSIFRSWKDSIIVLGTTKAHLPWAEDLKLVSQCIDSVASKASIDVSKVEWSYTYNRKKLPTENGHDSPWNGVNQRQVVPKDWWVEDLTDLDIDAYKQVITAVKTKGMVAQGRDREAIKA

SEQ ID NO: 361 - DNA, 780 bp, Zea mays
  CDS (1)..(780)
  misc_feature (47)..(47): n at position 47 is a or g or c or t/u
atgttctccggcaccggaccctccggcggggcagcccactctacgtncaccggtggtgggggtggctcgccttccgacaggggcggccccgcgccctcggcctcggcgtcggtctccacgccagccagcgagagcaccgtcgcccgccgcctaaacggacttgacccccacggcgacgacgctccatcgtcgcagccagccacgagcaagaagaaaaagagaggggcacgggcagttggtcctgacaaaaatggccgtggattgcgtcaatttagcatgagagtatgtgagaaagtcgaaagcaaagggagaacaacctacaatgaggtggcagacgaactggttgctgagttttcagatcccaatattaatattgactctccagatcctgataattcgtctgcgcaacaatatgatgagaaaaatatccgaagaagagtttatgatgcgctgaatgtcctaatggctatggaaattatatctaaagataaaaaggaaatacagtggagaggtctgcccaagacaagtatgaatgatattgaagaactgaagacagaggtcaatggactgaaaggtcggattgacaagaaaaatgcatatctgcaggatttacaagatcaatatgcatgtctgcaaaacttggttcggcgaaatgagcagctatatgggtcaggagacgcaccttccggtggagtggccttgccatttatactagttcagacacgtcctcatgcaactgtagaagtggagatatcagaagatatgcagcacgtgcattga

SEQ ID NO: 362 - protein, 259 aa, Zea mays
  misc_feature (16)..(16): Xaa can be Tyr or Ser or Cys or Phe
MFSGTGPSGGAAHSTXTGGGGGSPSDRGGPAPSASASVSTPASESTVARRLNGLDPHGDDAPSSQPATSKKKKRGARAVGPDKNGRGLRQFSMRVCEKVESKGRTTYNEVADELVAEFSDPNINIDSPDPDNSSAQQYDEKNIRRRVYDALNVLMAMEIISKDKKEIQWRGLPKTSMNDIEELKTEVNGLKGRIDKKNAYLQDLQDQYACLQNLVRRNEQLYGSGDAPSGGVALPFILVQTRPHATVEVEISEDMQHVH

SEQ ID NO: 363 - DNA, 1008 bp, Zea mays
  CDS (1)..(1008)
atgcacctgttcatggctgctgcgtgcatcagccatcgctttcgccactccaagctcccggtactggtcctggcgctggccaacgttgttggccgcggacgggctccggttgtggcggccgacgttcaacgcctcgtgtgcccttgcggggttggtaacattaaaggcggcgtgagagctgccgtgctgctggaccgccgcatgggggcctccctgctccgcctccacttccacgactgcttcgtgcagggctgcgacgcgtccgttctgctggacgacacggcgagcttcaccggcgagaagggggcggggccgaacgcggggtcgctccggggcttcgacgtgatccacaacatcaagatgctgctggagctgctgtgcccgcagaccgtctcctgcgccgacatcctcgccgtcgccgcccgcgactcggttgcacaactgggaggaccatcgtgggcggttccgctgggcaggagggacgcgaccacggcgagcgcgtccctggccaacagtgacctccctgggcctaccagcagcctcaacggcctgctcaacgctttctccaacaagggtttgagcagcaccgacatggttgccctctcaggtgcccacaccgtcggccgggcgcagtgcaagaactgccgggcccggatctacaacgacaccgacatcgacgcctccttcgcggcgtcgctgcgggccagctgtcccgcgcaggccggcgccggcgacggcgcgctcgagccgctcgacggctccacgccggacgccttcgacaacgcctacttcggcaacctgctctcccagcgcggcctgctccactccgaccaggcgctcttcggcggcggcggcggcggcgcgactgacggcctggtcagcgcctacgcgtccaacgccggccagtggggggccgacttcgcggcggccatggtcaagatgggcagcatcagcccgctcaccggcacggacggcgagatcagggtcaactgccggagagtgaattga

SEQ ID NO: 364 - protein, 335 aa, Zea mays
MHLFMAAACISHRFRHSKLPVLVLALANVVGRGRAPVVAADVQRLVCPCGVGNIKGGVRAAVLLDRRMGASLLRLHFHDCFVQGCDASVLLDDTASFTGEKGAGPNAGSLRGFDVIHNIKMLLELLCPQTVSCADILAVAARDSVAQLGGPSWAVPLGRRDATTASASLANSDLPGPTSSLNGLLNAFSNKGLSSTDMVALSGAHTVGRAQCKNCRARIYNDTDIDASFAASLRASCPAQAGAGDGALEPLDGSTPDAFDNAYFGNLLSQRGLLHSDQALFGGGGGGATDGLVSAYASNAGQWGADFAAAMVKMGSISPLTGTDGEIRVNCRRVN

SEQ ID NO: 365 - DNA, 441 bp, Zea mays
  CDS (1)..(441)
atggcatctgttcttcagctttcaagtatactacaccaccaccactactcgcgggggtctgttgcaactgagctggcagtggatattgtcgtcactgtaggggatgtcaagttctaccttcacaagttccctcttctgtccaagagctcccgcctacaaacgctggtggcctcgacaagcgaggagggcagcgacgaggtggacatctccgacatcccgggcggcccggcggcgttcgaggtctgtgccaagttctgctacggcatggtggtgacgctcaacgcctacaacgtgctggccgcccggtgcgcggcggagtacctggagatgtcggagacggtggagaaggggaacctggtgtacaagatcgacgtgttcctgtcggccagcatcttccgggcctggaaggactccatcatcgtgctgcagtcgacgaggtga

SEQ ID NO: 366 - protein, 146 aa, Zea mays
MASVLQLSSILHHHHYSRGSVATELAVDIVVTVGDVKFYLHKFPLLSKSSRLQTLVASTSEEGSDEVDISDIPGGPAAFEVCAKFCYGMVVTLNAYNVLAARCAAEYLEMSETVEKGNLVYKIDVFLSASIFRAWKDSIIVLQSTR

SEQ ID NO: 367 - DNA, 858 bp, Zea mays
  CDS (1)..(858)
atggatcaagagggggagcaggcggcggcggcggcgatggggcgcgggaaggtgcagctgaagcggatagagaacaagataaaccggcaggtgaccttctccaagcgccggaacggcctgctcaagaaggcgcacgagatctccgtcctctgcgatgccgaggtcgccgtcatcgtcttctcccccaagggcaagctctacgagtacgccaccgactcccgcatggacaaaattcttgaacgctatgagcgatattcctatgctgaaaaggctcttatttcagctgaatctgaaagtgagggaaattggtgccacgaatacaggaaactgaaggccaaaattgagaccatacaaaaatgccacaagcacctgatgggagaggatctagagtctttgaatcccaaagagctccagcaactagagcagcagctggatagctcactgaagcacatcagatcaaggaagagccaccttatggccgagtctatttctgagctacagaagaaggagaggtcactgcaggaggagaacaaggctctgcagaaggaacttgcggagaggcagaaggccgtcgcgagccggcagcagcagcaacagcagcaggtgcagtgggaccagcagacacatgcccaggcccagacaagctcatcatcgtcctccttcatgatgaggcaggatcagcagggactgccgcctccacacaacatctgcttcccgccgttgacaatgggagatagaggtgaagagctggctgcggcggcggcggcgcagcagcagcagccactgccggggcaggcgcaaccgcagctccgcatcgcaggtctgccaccatggatgctgagccacctcaatgcatga

SEQ ID NO: 368 - protein, 285 aa, Zea mays
MDQEGEQAAAAAMGRGKVQLKRIENKINRQVTFSKRRNGLLKKAHEISVLCDAEVAVIVFSPKGKLYEYATDSRMDKILERYERYSYAEKALISAESESEGNWCHEYRKLKAKIETIQKCHKHLMGEDLESLNPKELQQLEQQLDSSLKHIRSRKSHLMAESISELQKKERSLQEENKALQKELAERQKAVASRQQQQQQQVQWDQQTHAQAQTSSSSSSFMMRQDQQGLPPPHNICFPPLTMGDRGEELAAAAAAQQQQPLPGQAQPQLRIAGLPPWMLSHLNA

SEQ ID NO: 369 - DNA, 846 bp, Zea mays
  CDS (1)..(846)
atgttgggggtgaaggcctggaagatggtggcgtggccagggtcggcgaggtgggcgaagaggttgtcgatggggccggtgccggtgtactcggcctggaaccaagcgcccatgacggcgagcatggcgaggcgtccgttcttgatctccttggtgcgcagctccttgatcttctccggcgagccggagccccagccgagcgggtcaaaccacaggccaccagggtacccgacgtcggtgccggtgagcttgttgctggggaagatgggatcggtgttgacgcttccgggcttgatgatgtcagcccaacggcggccctcggcccagccgatgaggatgagctcgatgatgaagagggtggtggtgtcggtgaagtactgctgctcgccggcggtgtaccagaagggcgtgttgaggacgccgatcttggtcaggaactccgggatgaagatacccgccgcgccgagcatcgcccaccggcagtgcaccagctccgcctgcacgttccaccgcaggctctccgggtcagatccgaggccccagggatcaaagccgaagtcgccgggaaggctgccgtcgagccacggcggaggggtgctgccggggaaccagatcggcctgtcggaatccgccgcggcgcgcacggcgaacgacggccgggctgcctcggcctgcctcagcagcgtcttgccgacgaggaaggaggaagaggaggaggaggagaacaacgacgacgacgcccgctgctgcccattcctggggagcgccgcgacggcggtggtggaggacgaggaggcggacacgagtgccattgcgcgcgcacaagctgtggcgtcggtgagctga

SEQ ID NO: 370 - protein, 281 aa, Zea mays
MLGVKAWKMVAWPGSARWAKRLSMGPVPVYSAWNQAPMTASMARRPFLISLVRSSLIFSGEPEPQPSGSNHRPPGYPTSVPVSLLLGKMGSVLTLPGLMMSAQRRPSAQPMRMSSMMKRVVVSVKYCCSPAVYQKGVLRTPILVRNSGMKIPAAPSIAHRQCTSSACTFHRRLSGSDPRPQGSKPKSPGRLPSSHGGGVLPGNQIGLSESAAARTANDGRAASACLSSVLPTRKEEEEEEENNDDDARCCPFLGSAATAVVEDEEADTSAIARAQAVASVS

SEQ ID NO: 371 - DNA, 849 bp, Zea mays
  CDS (1)..(849)
  misc_feature (47)..(837): n at positions 47 and 837 is a or g or c or t/u
atgcgctccggctgcgctctgccttgctttcctgctacctgctctancgcgagcgagagaggtacggcggccgatctggcggcgcaggcggagggctcggccggggccggcaagtcggcgccgaacatggggaggggccgggtcgagctcaagcggatcgagaacaagatcaaccgccaggtcaccttcgccaagcgccgcaacggcctgctcaagaaggcgtacgagctctcggtgctctgcgacgccgaggtcgcgctcatcatcttctccaaccgcggcaagctctacgagttctccagcacgcagagcatgccaaaaacacttgaaaagtaccaaaaatgcagttttgcagggcctgaaacagcactccagaatagagagaatgagcaactgaaaagtagccgcaatgagtacctcaaactgaaggcacgtgttgataatttacagcggactcaaaggaacttgcttggtgaagatcttgagtcattaggcataaaagagctggagcacctggagaagcagctcgattcgtccttgaagcacataagatctacaaggacacaacacatggttgatcaactgacagaacttcaaaaaaaagaacaaatgttttgtgaagcaaataagtgtcttcgaagaagactggaggagagcaaccaggttatatggcagcatgcgtgggagcaaagcgagcggcattctgaagtgcagccgcagcagctcaatggcaataacttcttccatcccctcgatggtgctggtgaacccacccttcagatagggtatccttcagaggcactgactagctcatgcatgaccaccttcctgcccccntggttgccatga

SEQ ID NO: 372 - protein, 282 aa, Zea mays
  misc_feature (16)..(16): Xaa can be Asn or Thr or Ser or Ile
MRSGCALPCFPATCSXASERGTAADLAAQAEGSAGAGKSAPNMGRGRVELKRIENKINRQVTFAKRRNGLLKKAYELSVLCDAEVALIIFSNRGKLYEFSSTQSMPKTLEKYQKCSFAGPETALQNRENEQLKSSRNEYLKLKARVDNLQRTQRNLLGEDLESLGIKELEHLEKQLDSSLKHIRSTRTQHMVDQLTELQKKEQMFCEANKCLRRRLEESNQVIWQHAWEQSERHSEVQPQQLNGNNFFHPLDGAGEPTLQIGYPSEALTSSCMTTFLPPWLP

SEQ ID NO: 373 - DNA, 1122 bp, Zea mays
  CDS (1)..(1122)
atggcgcgccaacagtggagcagcggcggcctcgcggttcgcgttgctggccgtgctgtcgtccgtgctcatctgctcgggccacccggtgccgggcgggctccccctgctgccgcacttctacggccacgcgtgcccgcagatggaggccatcgtggggtccctcgtggcgaaggcgcacgcggaggacccgcgcatggcggcgtccctgctgcggatgcacttccacgactgcttcgtgcagggctgcgacgtctttttgctgctggacgccgacggcagcggcaggttcgtcaccgagaaacggtccaaccccaacaaggactcgctccgggggttcgaggtcatcgacgagatcaaggccgcgctcgagcacgcctgcccgcacaccgtctcctgcgccgacatcgtcgccgtcgccgccagggactccgtcgtcctgaccggcggacctggctgggaggtgccactggggaggagggactcgctgacggccagcctgagcggctccaacaacctcatccctgctcccaacgactccctccccaccatcatcggcaagttcgccaaccaaggcctcgacatcgtcgacctcgtcgcactctcaggggggcacaccatcggcgactcgcggtgcgtgagcttccggcagcggctgtacggccagaacaacaacgggcaggtggaccggacgctgaacccggcgtacgcggcggagctgcggggccggtgcccgcggtcgggcggcgaccagaacctgttcgcgctggacctggtgacccagttccggttcgacaaccagtactaccacaacatcctggccatgaacgggctgctcagctccgacgagatcctgctcacgcagagccgcgagaccatggacctcgtccaccgctacgccgccgaccagggcctcttcttcgaccacttcgccaagtccatggtcaagatgggcaacatctcgccgctcaccgggagcgccggcgagatcaggcacaactgcaggagggtcaaccacttctagcttccatggagtggccatccgtgcagtggtgttcttgctttggtttcatttctggatgcatgcgtcatctttcatacttggatttaagtgtgcagtga

SEQ ID NO: 374 - protein, 373 aa, Zea mays
MARQQWSSGGLAVRVAGRAVVRAHLLGPPGAGRAPPAAALLRPRVPADGGHRGVPRGEGARGGPAHGGVPAADALPRLLRAGLRRLFAAGRRRQRQVRHRETVQPQQGLAPGVRGHRRDQGRARARLPAHRLLRRHRRRRRQGLRRPDRRTWLGGATGEEGLADGQPERLQQPHPCSQRLPPHHHRQVRQPRPRHRRPRRTLRGAHHRRLAVRELPAAAVRPEQQRAGGPDAEPGVRGGAAGPVPAVGRRPEPVRAGPGDPVPVRQPVLPQHPGHERAAQLRRDPAHAEPRDHGPRPPLRRRPGPLLRPLRQVHGQDGQHLAAHRERRRDQAQLQEGQPLLASMEWPSVQWCSCFGFISGCMRHLSYLDLSVQ

SEQ ID NO: 375 - DNA, 462 bp, Zea mays
  CDS (1)..(462)
atggtgaatgattctcgaagccaatccatcctggttagtggtgaaagtggtgctggcaaacccgaaccaacgaagcttattatgcagtatctcacctttgttggcggtagagccgctcttgatgaccggacggttgaacaacaggttctagaatctaaccctcttttggaggcatttggcaatgcaaaaccagtacgcaatgacaattcaagtcgatttggaaaattcgtagagatacagtttgattcaagtggtagaatatctggagctgctattaggacctatcttttggaaaggtcccgtgttgtgcaaattactgatcctgaaaggaattttcattgcttctaccaattgtgtgcctctggaaaggacgcagagctgtacaaacttgggcatataacgcagttttcattactgaatcaaacgcatacacatgatttggaagggaccgacagcacgtga

SEQ ID NO: 376 - protein, 153 aa, Zea mays
MVNDSRSQSILVSGESGAGKPEPTKLIMQYLTFVGGRAALDDRTVEQQVLESNPLLEAFGNAKPVRNDNSSRFGKFVEIQFDSSGRISGAAIRTYLLERSRVVQITDPERNFHCFYQLCASGKDAELYKLGHITQFSLLNQTHTHDLEGTDST

SEQ ID NO: 377 - DNA, 690 bp, Zea mays
  CDS (1)..(690)
atggccgaaagactgtcgtgcttcccggcctccggtaggaagctctcgcgcgtggccagcagccagtcgctcttccgcgaacaggctccggcgcccgcgccctcgcctggcgctgctgctaaacagcacgcgggcgatggggcgtgcgatggcccctgccgcaagcggaaggcgtcgggcacgagcagcaagcagtccaaggccaaggaagcggtcaccacggctacacccgagtcccgggagactgcagagacgagggccaagaaatgcaagctctccacggacgaggagcggaagccggcggccggagagggatggcgtggcagtggcagtggcagtggcaaggggaaggagctggtggcggcggatgcggagccacccaaggactacatccacgtccgcgcgcgccggggccaggccaccgacagccacagcctcgccgagcgggtgaggagggagaagatcggcgagcgcatgaagctgctgcaggacctcgtgccgggctgcagcaaggtgaccgggaaggccgtgatgctggacgagatcataaactacgtgcagtcgctgcaacggcaagtggagttcttgtcgatgaagctgtcgaccgtcaacccgcgcctcgaactcggcgcggacgacagcttcgtccccagacccagagacgacgccaacaagctgtgcgcggcctga

SEQ ID NO: 378 - protein, 229 aa, Zea mays
MAERLSCFPASGRKLSRVASSQSLFREQAPAPAPSPGAAAKQHAGDGACDGPCRKRKASGTSSKQSKAKEAVTTATPESRETAETRAKKCKLSTDEERKPAAGEGWRGSGSGSGKGKELVAADAEPPKDYIHVRARRGQATDSHSLAERVRREKIGERMKLLQDLVPGCSKVTGKAVMLDEIINYVQSLQRQVEFLSMKLSTVNPRLELGADDSFVPRPRDDANKLCAA

SEQ ID NO: 379 - DNA, 618 bp, Zea mays
  CDS (1)..(618)
atgaatcccgggatcaaccgcatgcaactgcgccgcctctcgcctctcctagcgagcccgcgccgccgcctgcgattgcgctcccccacaaaccctagctctgccaccatgtccccgggcgccgctcacctggccactgccgccgacccggacgaggacctctgcgcgagcgccggggcgtcagaagcggaggtccccgcgcctgccccgcatcttccaccgctgccggtgtccgcggaggagcggttggaacgcgcctgggcgcactggaggcggctggggtccccacggctgctggtggcgccgatggtggacaactcggagctccccttccgcatgctgtgccgccgccacggcgccgacgcggcgtacacgcccatgctccactctcgcatcttctccgagaatgagaagtacaggtccatggagttcaccacgtgcaaggaggaccgaccactttttgttcagttttgtgccaatgatcctgacattttgttgcaagctgcgaagaaggtggaaccatattgcgactacgttgatatcaattttggttgcccgcagcgtattgcaagacggggtaactatggagcatttctcatggacaaccttcccctctga

SEQ ID NO: 380 - protein, 205 aa, Zea mays
MNPGINRMQLRRLSPLLASPRRRLRLRSPTNPSSATMSPGAAHLATAADPDEDLCASAGASEAEVPAPAPHLPPLPVSAEERLERAWAHWRRLGSPRLLVAPMVDNSELPFRMLCRRHGADAAYTPMLHSRIFSENEKYRSMEFTTCKEDRPLFVQFCANDPDILLQAAKKVEPYCDYVDINFGCPQRIARRGNYGAFLMDNLPL

SEQ ID NO: 381 - DNA, 1692 bp, Zea mays
  CDS (1)..(1692)
atggcaaaggctctcctaggtggcctatcggcgatcctcgtcgtggcggtggtcgtcggtgtggtcgccaccgtcacccgctccggcaagaaggccggcgacaacttcacggtcccgggggaggcttcccttgccacgtccggcaagtcggtcaagtccctgtgcgcgcccaccctatacaaggagtcgtgcgagaagacactgtcccaggccaccaatggcaccgagaaccccaaggaggtgttccacagcgtggccaaggtggcgctggagtcggtccagacggcggtcgagcagtccaagtcgatcggcgaggccaaggccagcgactccatgaccgagagcgcgcgcgaggactgcaagaagctcctggaggacgccgccgacgacctgaggggcatgctcgagatggccggcggcgacatcaaggtgctgttcagccggtccgacgacctcgagacctggctcacgggcgtcatgacgttcatggacacctgcgtcgacggcttcgtcgacgagaagctcaaggccgacatgcactccgtgctgcgcaacgccaccgagctcagcagcaacgcgctggccatcaccaacagcctcggcgggatcctgaagaagatggacctcggcatgttcagcaaggactcgcgccgccgactgctgtcgtcggagcaggatgagaagggctggcccgtgtggatgcggtcgccggagaggaagctgctggcgtcgggcaaccagcccaagccgaacgcgatcgtggccaaggacggcagcgggcagttcaagagcatccagcaggccgtggacgccgtgcccaagggccatcaggggaggtacgtcatctacgtgaaggccggcctctacgacgagatcgtcatggtccccaaggacaaggtcaacatcttcatgtacggcgacgggcctaagcaaagccgcgtgaccggccgcaagagcttcgccgacggcatcaccaccatgaagaccgccaccttctccgtcgaggcgtccgggttcatctgcaagaacatggggttccacaacacggccggcgcggagcggcaccaggcggtggcgctccgggtgcagggggacctcgcggcgttctacaactgccggttcgacgcgttccaggacacgctgtacgtgcacgcgcggcggcagttcttccgcaactgcgtggtctccggcaccatcgacttcatcttcggcaactcggcggcggtgttccagaactgcctcatcatcacgcggcggcccatggacaaccagcagaactcggtgacggcgcacgggcgcaccgaccccaacatgaagtccgggctcgtcatccagaactgccgcctggtgcccgaccagaagctgttcccggaccgcttcaagatcccctcgtacctgggccgcccctggaaggagttctcgcgcctcgtcatcatggagagcaccatcgccgacttcgtcaagccagaggggtacatgccctggaacggcgacttcgccctcaagacgctctactacgccgagtacaacaaccgcgggcccggcgccggcaccagcaagagggtcaactggcccggcttccacgtcatcggacggaaggaggccgagccgttcaccgccgggccgttcatcgacggcgccatgtggctcaagtacaccggcgcgccgcacatacttggtttcaagttctga

SEQ ID NO: 382 - protein, 563 aa, Zea mays
MAKALLGGLSAILVVAVVVGVVATVTRSGKKAGDNFTVPGEASLATSGKSVKSLCAPTLYKESCEKTLSQATNGTENPKEVFHSVAKVALESVQTAVEQSKSIGEAKASDSMTESAREDCKKLLEDAADDLRGMLEMAGGDIKVLFSRSDDLETWLTGVMTFMDTCVDGFVDEKLKADMHSVLRNATELSSNALAITNSLGGILKKMDLGMFSKDSRRRLLSSEQDEKGWPVWMRSPERKLLASGNQPKPNAIVAKDGSGQFKSIQQAVDAVPKGHQGRYVIYVKAGLYDEIVMVPKDKVNIFMYGDGPKQSRVTGRKSFADGITTMKTATFSVEASGFICKNMGFHNTAGAERHQAVALRVQGDLAAFYNCRFDAFQDTLYVHARRQFFRNCVVSGTIDFIFGNSAAVFQNCLIITRRPMDNQQNSVTAHGRTDPNMKSGLVIQNCRLVPDQKLFPDRFKIPSYLGRPWKEFSRLVIMESTIADFVKPEGYMPWNGDFALKTLYYAEYNNRGPGAGTSKRVNWPGFHVIGRKEAEPFTAGPFIDGAMWLKYTGAPHILGFKF

SEQ ID NO: 383 - DNA, 675 bp, Zea mays
  CDS (1)..(675)
atggtcggtggacacggccacgtacccgatgaacgtgccggactcgctccacatcttggcgttggcggccgtcttgatgccgaagttggggaacttgaggtcgttgcaggtggcgtagaggtagcgggtgacctcgtagccgatgccgccgaggccgacgtcgtggaagaaggtcttcgccgggtacttgcagctgccgcagtagggggagaagcggtcgtagtcgaagctgtcgtaggtggcctgggcgaactcgccgtagcggatgagctcctggaggagcacgccgtcgatggggtccagcaggccctcccagttgttgctgccgtggatctccggccaccgcgcggcgagctccccatcgtcgggcgccgcctgatgagagctgaggtccacgtcctcgatcgtcacaggggcggcctcctgttcggctctcgtcgccgaggcgacgacgacgagatagcggcgagaacgacgacggcgctgaagcgtgttcgtcagtgccacagcggggaacccgccggcccggtggtgcacggtggggacgaggctcaggcaggaagatacggtggccgccatcggctgcttggtgctgcggtcaccgtagttgtcgacgcggtcagagatcacgcagcacgccgctgtgtgtttgttttgaatgtgagtgtagtctga

SEQ ID NO: 384 - protein, 224 aa, Zea mays
MVGGHGHVPDERAGLAPHLGVGGRLDAEVGELEVVAGGVEVAGDLVADAAEADVVEEGLRRVLAAAAVGGEAVVVEAVVGGLGELAVADELLEEHAVDGVQQALPVVAAVDLRPPRGELPIVGRRLMRAEVHVLDRHRGGLLFGSRRRGDDDEIAARTTTALKRVRQCHSGEPAGPVVHGGDEAQAGRYGGRHRLLGAAVTVVVDAVRDHAARRCVFVLNVSVV

SEQ ID NO: 385 - DNA, 798 bp, Zea mays
  CDS (1)..(798)
atgacctccatcgtcaataattgcaggcagatccatagtctgctggtggcgagacaaagcaacggatcgtcgtcgatccggagagcggaaagcgcgcagatcgcgacggccatggggcgcggcaaggtggtgctgcagcggatcgagaacaagatcagccgccaggtcaccttcgccaagcgccggaacggcctgctcaagaaggcgtacgagctctccatcctctgcgacgccgaggtcgcgctcgtcctcttctcccacgccggccgcctctaccagttctcatcctcctccgatctgcttaagactctagagcggtaccagaggcacatctatgcttcagctgatgctgcagttccatcttgcgatgagatgcagaataactatcaagaatatgtgaagctgaaagcacgagttgaggttttacaacactcacaaaggaatcttcttggtgaagaactggctccacttagcccaagtgaacttgaccagcttgagagtcaagtagacaagaccttgaagcaaataagatcaagaaagactcaggtgttacttgatgaactttgcgacttaaagagaaaggaacaaatgctgcaagacgctaacagggttctgaaaaggaagctgcacgagtttgaggcagaggctgcttctcccccgcaattggcgtggcaaggcggaggcggcatgttgtcccatgaccctccacagccagaacacttcttcgtggctctggagagcaacgcgcctctgcaacctacataccatactatggacatgaaccagcagccagagtga

SEQ ID NO: 386 - protein, 265 aa, Zea mays
MTSIVNNCRQIHSLLVARQSNGSSSIRRAESAQIATAMGRGKVVLQRIENKISRQVTFAKRRNGLLKKAYELSILCDAEVALVLFSHAGRLYQFSSSSDLLKTLERYQRHIYASADAAVPSCDEMQNNYQEYVKLKARVEVLQHSQRNLLGEELAPLSPSELDQLESQVDKTLKQIRSRKTQVLLDELCDLKRKEQMLQDANRVLKRKLHEFEAEAASPPQLAWQGGGGMLSHDPPQPEHFFVALESNAPLQPTYHTMDMNQQPE

SEQ ID NO: 387 - DNA, 714 bp, Zea mays
  CDS (1)..(714)
atgcctcctcagatccggccatctcctgcccgcctcgccgccggtcccgcggcccggaaccctaaagctcacccccgtggcggtgcccccggtcgcgtggggagaatggaggcggcgctggaggcggcgcgcgccaaggacaccaaggagcgcctggccggggtcgagcggctgcacgaggcgctcgacgccgcggcgcgccgcgggctgaccgcggccgaggtcaccgcgctcgtggacacctgcatggatctgacgcgggacgccaacttccgcatcgcccagggcggcctccaggcgctctccgccgccgccgtcgtcgccggcgaccacttcaagatccatctcaacgccctcgtcccggccgccgtcgaacgcctcggcgacggcaagcagcccgttcgcgacgccgcgcggcagctcctcattactctgatggaggtttcttcaccaacaatcatagttgaaagagctggtagttatgcatggactcataagagttggagggtgcgggaagagtttgtacgtacggtggcaactgcaattgggctatttgcttctactgagatttccttgcaacgggttttgctttcacctgtcctgcaattgatgaatgattcgaaccaaagtgtccgagatgctgctatctattgtattgaggagatgtacaaacacatgggatcacaatttcatgaagagttgcagcgccattga

SEQ ID NO: 388 - protein, 237 aa, Zea mays
MPPQIRPSPARLAAGPAARNPKAHPRGGAPGRVGRMEAALEAARAKDTKERLAGVERLHEALDAAARRGLTAAEVTALVDTCMDLTRDANFRIAQGGLQALSAAAVVAGDHFKIHLNALVPAAVERLGDGKQPVRDAARQLLITLMEVSSPTIIVERAGSYAWTHKSWRVREEFVRTVATAIGLFASTEISLQRVLLSPVLQLMNDSNQSVRDAAIYCIEEMYKHMGSQFHEELQRH

SEQ ID NO: 389 - DNA, 1350 bp, Zea mays
  CDS (1)..(1350)
atgagcgcatccgtgggccggacccgcgtggggcggtacgagctcggccggaccctcggcgaaggcaccttcgccaaggtcaagttcgcccggaacgtcgagaccggagagaatgtcgccatcaagatcctcgacaaggagaaggtcctcaagcacaagatgatcgcccagatcaagcgagagatctcgaccatgaagctcatcaggcaccccaacgtcatccggatgtatgaggtgatggccagcaagacaaagatatacatcgtcatggagctcgtcaccggtggcgaactcttcgacaaaatcgcctcgcgtggaaggctgaaagaggatgacgcaaggaagtacttccagcagctgatcaacgctgtcgattactgccatagccgaggcgtctaccaccgcgatctcaagcctgaaaatctcctgcttgatgctagcggcacgctcaaggtttcggattttggactgagcgcactatctcaacaagtccgagaggatggtctgctgcacacaacctgtggaactcccaactatgttgctcccgaggttataaacaataagggctatgatggagctaaggctgatctgtggtcatgtggagtgattctctttgtcctcatggcggggtacctcccatttgaagattcgaacctgatgtcgctctacaagaagatcttcaaagcggatttcagttgcccgtcctggttctccacaagcgcaaagaagctcatcaagaagatacttgaacctaatgctaacaatagaataactattgcagagctcattaacaacgagtggttcaagaaggggtatcagcctcccagatttgaaacagcagatgttaatctggatgacgtgaactccatcttcgatgaatccggggagccagcacagcttgttgttgagaggagagaagaaaggccatcagtgatgaacgctttcgagttaatctctacgtctcagggcctcaatctcgggacgctcttcgagaagcaaacgggttctgttaagcgagaaacaaggtttgcgtcaaggcttcctgcaaatgagatactgtcgaagatcgaagcagcagcaggacccatgggcttcaacgttcagaagcgcaactataagctgaagctgcaaggggagaaccctggaaggaaaggtcagctggccatcgcaacagaggttttcgaggtcacgccttccctgtacatggttgagctgcgcaagtccaacggcgacacccttgaattccacaagttctaccacaacatctcaaatggactgaaggacgtgatgtggaagccggagagcggcatcgtggaaggcgacgaggcgcggcaaaggaggtccccgtga

SEQ ID NO: 390 - protein, 449 aa, Zea mays
MSASVGRTRVGRYELGRTLGEGTFAKVKFARNVETGENVAIKILDKEKVLKHKMIAQIKREISTMKLIRHPNVIRMYEVMASKTKIYIVMELVTGGELFDKIASRGRLKEDDARKYFQQLINAVDYCHSRGVYHRDLKPENLLLDASGTLKVSDFGLSALSQQVREDGLLHTTCGTPNYVAPEVINNKGYDGAKADLWSCGVILFVLMAGYLPFEDSNLMSLYKKIFKADFSCPSWFSTSAKKLIKKILEPNANNRITIAELINNEWFKKGYQPPRFETADVNLDDVNSIFDESGEPAQLVVERREERPSVMNAFELISTSQGLNLGTLFEKQTGSVKRETRFASRLPANEILSKIEAAAGPMGFNVQKRNYKLKLQGENPGRKGQLAIATEVFEVTPSLYMVELRKSNGDTLEFHKFYHNISNGLKDVMWKPESGIVEGDEARQRRSP

SEQ ID NO: 391 - DNA, 741 bp, Zea mays
  CDS (1)..(741)
atgctcccctcctctcccctcccctgtcgagtccggctgtccccacgacccccacgccacgcgctctctcccgctcctcgcaacggcaaaaccccagcgaattccccacgcgcccgccagctcggcgcggcccagggatccatggagaagtacgagctgctcaaggacatcggctccggcaacttcggcgtggcgcggctcatgcggaacaaggacaccaaggagctcgtcgccatgaagtacatcccgagggggctcaagattgacgagaatgtggcgagggagatcataaaccaccgctcgctgcggcaccacaacatcatccgcttcaaggaggtcgtgctcacgcccacgcacctcgccatcgtcatggagtacgccgccggcggcgagcttttcgacaggatctgcagcgccggcaggttcagcgaggacgaggcgaggtatttcttccagcagctcatctgcggtgtcagctactgccacttcatgcaaatttgtcaccgggacttgaagctggagaacacgctgttggatggcagcccggcgccgcggctaaagatctgcgactttggctactctaagtcatcgctgctgcattcaaagcctaaatccaccgttggaactccggcgtacattagctccggaggtgctctccgccgggaatatgacggcaagatggcagacgtttggtcttgtggagtgactctttacgtgatgctggtggtgctacccttttga

SEQ ID NO: 392 - protein, 246 aa, Zea mays
MLPSSPLPCRVRLSPRPPRHALSPAPRNGKTPANSPRARQLGAAQGSMEKYELLKDIGSGNFGVARLMRNKDTKELVAMKYIPRGLKIDENVAREIINHRSLRHHNIIRFKEVVLTPTHLAIVMEYAAGGELFDRICSAGRFSEDEARYFFQQLICGVSYCHFMQICHRDLKLENTLLDGSPAPRLKICDFGYSKSSLLHSKPKSTVGTPAYISSGGALRREYDGKMADVWSCGVTLYVMLVVLPF

SEQ ID NO: 393 - DNA, 456 bp, Zea mays
  CDS (1)..(456)
atggtgcccctgccgttggccgcccaccggacgacggcgctgctccccaccatggcgcccttgcccgagaagccgaccgccacgtacgagcccctgtccggcgccgagaggatgaagctccactcgctgggccccgtgttcttgtacctgaggacgaagtcctgctgcttccaggcggcggtgcagcggaaggacgtggagtcgaagggcacgaggctggcgaccgcgaccttggccctggcgcacgagtccgccgccgactcctggtggctcagcgcgacgcagaacccgagaaggcagagcagcagcaccagcaggcgcacggagcgcgtcccggaagaagccgccattgcccgtgcgctgctcgctccctgttcctgcgctgcccttcctgcctcgggctgtgtggccttgctggatttggcaggcgccgggacaagattggtgcgtcgatga

SEQ ID NO: 394 - protein, 151 aa, Zea mays
MVPLPLAAHRTTALLPTMAPLPEKPTATYEPLSGAERMKLHSLGPVFLYLRTKSCCFQAAVQRKDVESKGTRLATATLALAHESAADSWWLSATQNPRRQSSSTSRRTERVPEEAAIARALLAPCSCAALPASGCVALLDLAGAGTRLVRR

SEQ ID NO: 395 - DNA, 630 bp, Zea mays
  CDS (1)..(630)
atgttccggcgacgattcgttggacacgctacgccgcattcctccccgcagccacttccttcgcccacacgcccgcgcgctcggaatactctgaggatggtgctcgaaccaagggcgatggttcgtctcgctttcgtctcgctgcgtgcgctctctgtcactccccctctctctcctcatcagatccggccatggacaccaaggagcgtctggtcggggtcgagctgctgcacgaggcgcttgacgccgcggcgcgggctgacggcggccgaggtcaccgcgctggtggacacctgcatggatctgacgcgggatgccaacttctgcatcgcccagggcggcctccaggcgctctccgtcgccgccgtcgtcgcgggcgaccacttcaagatccacctcaacgccctcgtccccgccgccgtcgagcgcctcgacgacggcaagcaacccgtccgcgacgccgcgggacagctcctcatcacgctcatggagtgttcttcaccaacaatcatagttgagagagctggtagttatgcatggactcataagatatggagggggagggacgagtttgtacgtacggtggcatctgcagttgggctatttgcttctaccgagatttccttgtga

SEQ ID NO: 396 - protein, 209 aa, Zea mays
MFRRRFVGHATPHSSPQPLPSPTRPRARNTLRMVLEPRAMVRLAFVSLRALSVTPPLSPHQIRPWTPRSVWSGSSCCTRRLTPRRGLTAAEVTALVDTCMDLTRDANFCIAQGGLQALSVAAVVAGDHFKIHLNALVPAAVERLDDGKQPVRDAAGQLLITLMECSSPTIIVERAGSYAWTHKIWRGRDEFVRTVASAVGLFASTEISL

SEQ ID NO: 397 - DNA, 795 bp, Zea mays
  CDS (1)..(795)
atgcgatcctctttactcctcccctcccaccaccaccgcccctcccaactacaccacaccgcaccggcaccaccaccaaccgagcggctccaggctcctgctcaggaaggggagaagaggcgagccttccttgggaagtcgcaggaggagagaaggggaacaaagatggggcgcggcaagatcgagatcaagcggatcgagaactccaccaaccgccaggtgaccttctccaagcgccgcaacgggatcctcaagaaggcgcgggagatcagcgtgctctgcgacgccgaggtcggcgtcgtcgtcttctccagcgccggcaagctttacgactactgctccccgaagacatcgctatcaaaaatcctagagaagtaccagaccaactctggaaagatactgtggggtgagaagcacaagagccttagtgcagagattgaccgtataaagaaagagaacgacaccatgcagatcgagctcaggcacctgaaaggtgaagatctaaactcgctgcaacccaaagacctgatcatgatcgaggaggcacttgataatggactgacgaacctgaatgagaaactgatggagcactgggaaaggcgtgtgacaaacactaagatgatggaagacgagaacaaattgctggccttcaaactccaccagcaagatatcgcgctgagcggcagcatgagagagcttgagctgggttaccatcctgaccgggacctggcggcccagatgccaatcaccttccgcgtgcagcccagccatcccaacttgcaggagaacaattga

SEQ ID NO: 398 - protein, 264 aa, Zea mays
MRSSLLLPSHHHRPSQLHHTAPAPPPTERLQAPAQEGEKRRAFLGKSQEERRGTKMGRGKIEIKRIENSTNRQVTFSKRRNGILKKAREISVLCDAEVGVVVFSSAGKLYDYCSPKTSLSKILEKYQTNSGKILWGEKHKSLSAEIDRIKKENDTMQIELRHLKGEDLNSLQPKDLIMIEEALDNGLTNLNEKLMEHWERRVTNTKMMEDENKLLAFKLHQQDIALSGSMRELELGYHPDRDLAAQMPITFRVQPSHPNLQENN

SEQ ID NO: 399 - DNA, 723 bp, Zea mays
  CDS (1)..(723)
atggggaggggaaagatcgtgatccgcaggatcgataactccacgagccggcaggtgaccttctccaagcgccggaacgggatcttcaagaaggccaaggagctcgccatcctctgcgatgcggaggtcggcctcgtcatcttctccagcaccggccgcctctacgagtactctagcaccagcatgaaatcagttatagatcggtacggcaaggccaaggaagagcagcaagtcgtcgcaaatcccaactcggagcttaagttttggcaaagggaggcagcaagcttgagacaacaactgcacaacttgcaagaaaattatcggcagttgacgggagatgatctttctgggctgaatgtcaaagaactgcagtccctggagaatcaattggaaacaagcctgcgtggtgtccgcgcaaagaaggaccatctcttgatagatgagattcacgatttgaatcgaaaggcaagtttatttcaccaagaaaatacagacttgtacaataagatcaacctgattcgccaagaaaatgatgagttacataaaaagatctatgagactgaaggaccaagtggagttaatcgggagtcaccgactccattcaactttgcagtagtagaaaccagagatgttccagtgcaacttgaactcagcacactgccacaacaaaataacattgagccatctactgctcctaagctaggattgcaattaattccatga

SEQ ID NO: 400 - protein, 240 aa, Zea mays
MGRGKIVIRRIDNSTSRQVTFSKRRNGIFKKAKELAILCDAEVGLVIFSSTGRLYEYSSTSMKSVIDRYGKAKEEQQVVANPNSELKFWQREAASLRQQLHNLQENYRQLTGDDLSGLNVKELQSLENQLETSLRGVRAKKDHLLIDEIHDLNRKASLFHQENTDLYNKINLIRQENDELHKKIYETEGPSGVNRESPTPFNFAVVETRDVPVQLELSTLPQQNNIEPSTAPKLGLQLIP

SEQ ID NO: 401 - DNA, 738 bp, Zea mays
  CDS (1)..(738)
  misc_feature (138)..(138): n at position 138 is a or g or c or t/u
atgataaatgatgaaacacatcgatctcctacagccgcaatacacactactgttcctccgattaacggaccggccggcgacgtgcatagcaggtacgcagcagctctagctagcaatggcgcctccccgccggccgancatggggcggcagaagatcgagatccggcgcatagagagcgacgaggcgcggcaggtgtgcttctcgaagcgccgcgcggggctgttcaagaaggccagcgagctgtccatcctctgcggcgccgatgtggccgccgtcgtcttctcccccgccggcaaggccttctccttcggccacccgtccgtggagtccgtcgtcgagcgcttcctcgcctcgtcgtccccctcgcctgccggtgccggtgccggccactccgccagcggcggcgaggaccgcgcggtctcggagctgaaccgccagcacggcgagctgcgcgcgcagctggacgccgtgaaggcgaggcaggagcgcgcggacgaggcgatccggaaggagcgcgaggcggggagcccggcgatggcgtggatcgacgcggaactgagcgggggcgcgatggggcacgacgacctggtcgcgttctgggccgcgcttgcgggcgtgcaggccgccgtggcggccagcgccgaccggctgctgcgcgacgcgctgctcgtcgggcgcaggggccggcagcagcagcagccggcccagcttgccgggggtggtggcgtggcctttga

SEQ ID NO: 402 - protein, 245 aa, Zea mays
  misc_feature (46)..(46): Xaa can be Asp or Glu
MINDETHRSPTAAIHTTVPPINGPAGDVHSRYAAALASNGASPPAXHGAAEDRDPAHRERRGAAGVLLEAPRGAVQEGQRAVHPLRRRCGRRRLLPRRQGLLLRPPVRGVRRRALPRLVVPLACRCRCRPLRQRRRGPRGLGAEPPARRAARAAGRREGEAGARGRGDPEGARGGEPGDGVDRRGTERGRDGARRPGRVLGRACGRAGRRGGQRRPAAARRAARRAQGPAAAAAGPACRGWWRGL

SEQ ID NO: 403 - DNA, 726 bp, Zea mays
  CDS (1)..(726)
atgggtcgcggcaaggtggagctgaagcggatcgagaacaagatcagccgccaggtgacgttcgccaagcgccgcaacggactgctcaagaaggcgtacgagctgtcgctgttgtgcgacgcggaggtcgcgctcatcatcttctccggccgcggccgcctctttgagttctccagctcctcatgcatgtacaaaacactcgagagataccgcagctccaactactcacaagaagtaaaaactccactggacactgaaattaaataccaggattatctcaagttgaggacaagggttgaattcctccaaactacacaaagaaatattcttggggaggatctgggtccacttagcatgaaggagctcgagcagctggaggaccaaatagagatatctctgaagcatatcagctcaagaaagaatcaaatgctacttgatcagctctttgacctcaaaagcaaggaacaagaattgctggatctcaataaagacctaaggaagcagctgcaagaaacaaggccagagaacgcgctccgtgtctcctgggaggaaggtgggcacagtggcgcaagtgggaatgttcttgatccttatcaggggctccttcagcacctggacaacgatccttccctgcagttcgggtaccatcatcaagcctacatggatcagctgaacaacgaggacctggtggacccgaatgagcatggtcgatctggatggatatga

SEQ ID NO: 404 - protein, 241 aa, Zea mays
MGRGKVELKRIENKISRQVTFAKRRNGLLKKAYELSLLCDAEVALIIFSGRGRLFEFSSSSCMYKTLERYRSSNYSQEVKTPLDTEIKYQDYLKLRTRVEFLQTTQRNILGEDLGPLSMKELEQLEDQIEISLKHISSRKNQMLLDQLFDLKSKEQELLDLNKDLRKQLQETRPENALRVSWEEGGHSGASGNVLDPYQGLLQHLDNDPSLQFGYHHQAYMDQLNNEDLVDPNEHGRSGWI

SEQ ID NO: 405 - DNA, 330 bp, Zea mays
  CDS (1)..(330)
  misc_feature (210)..(311): n at positions 210 and 311 is a or g or c or t/u
atgctcacggagccatgcggcgagcgtcccactgccgcaggcccgggtcgctgcacgcctgcaccccacgccgacaacaaggcaatcgtgagcaggcagagcaccgtgcaagaggcccacaaaagccaccgaaggggccaaccaatcggcaagccgctggccctgccagccgacgccaacaccgatgcacacgcccccgccctgccgccngcgccaacatgcaccctagtagatagcgcagagcaaccatcggacgtgcaggacacggacgaccgacgagcaagcacgataaccccggcagatgtgcgcangccgccagcgggttggtga

SEQ ID NO: 406 - protein, 109 aa, Zea mays
  misc_feature (104)..(104): Xaa can be Lys or Thr or Arg or Met
MLTEPCGERPTAAGPGRCTPAPHADNKAIVSRQSTVQEAHKSHRRGQPIGKPLALPADANTDAHAPALPPAPTCTLVDSAEQPSDVQDTDDRRASTITPADVRXPPAGW

SEQ ID NO: 407 - DNA, 1026 bp, Zea mays
  CDS (1)..(1026)
atgagccaaggattcgaccgttgcgttctccgcccaaaccttaaagccccaatcccatatcgccccacaattccaaacttcgcctcgccgctccccctccctacacaagcttcctccccctccgcgccgctcctccaggctccagccatggcgatcgccaccgagtcgcgcggctgcgaggacagggattcagcccatgcaaacgaggagaagcggtgggtgctgtctgatttcgaggttgggaagcctcttgggaggggcaaattcggccacgtatatcttgccagagaaaagaggagcaatcaaattgtggctttgaaagttcttttcaagagccagcttaagcaatcacaggtcgagcatcagctgcgacgcgaagtggagattcagagtcatcttcgtcatcctaatattcttcgcctgtatgggtacttctatgatcagacccgggtttacctaatcctggaatatgctgccaagggtgagctgtataaggaactgacaaggtgtaaacatttttctgagagacgttcagcaacttatattgcatcattggctagagctctgatctacctgcatgggaagcatgttatccatcgggacattaaaccagaaaatcttttggttggagcccagggcgagatcaaaatcgccgactttggctggtctgtgcataccttcaacagaagaaggactatgtgcggaactctggattacctgccacctgaaatggtggagaagacagaacatgattaccatgttgacatatggagcctgggtattctgtgttatgagttcctttacggggtcccaccttttgaagctaaggagcactcagaaacatacagaaggatagtaaaagtcgacttgaagttcccactgaaaccattcgtttcgcccgccgcaaaggatttgatttcccagatgctggtcaagaactcggcccagcggctgcctctccacaaggttcttgagcacccatggatcgtccagaacgccgacccttccggtgtgtgcagaggatga

SEQ ID NO: 408 - protein, 341 aa, Zea mays
MSQGFDRCVLRPNLKAPIPYRPTIPNFASPLPLPTQASSPSAPLLQAPAMAIATESRGCEDRDSAHANEEKRWVLSDFEVGKPLGRGKFGHVYLAREKRSNQIVALKVLFKSQLKQSQVEHQLRREVEIQSHLRHPNILRLYGYFYDQTRVYLILEYAAKGELYKELTRCKHFSERRSATYIASLARALIYLHGKHVIHRDIKPENLLVGAQGEIKIADFGWSVHTFNRRRTMCGTLDYLPPEMVEKTEHDYHVDIWSLGILCYEFLYGVPPFEAKEHSETYRRIVKVDLKFPLKPFVSPAAKDLISQMLVKNSAQRLPLHKVLEHPWIVQNADPSGVCRG

SEQ ID NO: 409 - DNA, 816 bp, Zea mays
  CDS (1)..(816)
atgtttcctgctacctgctctagcgcgagcgagagaggtacggcggccgatctggcggcgcaggcggagggctcggccggggccggcaagtcggcgccgaacatggggaggggccgggtcgagctcaagcggatcgagaacaagatcaaccgccaggtcaccttcgccaagcgccgcaacggcctgctcaagaaggcgtacgagctctcggtgctctgcgacgccgaggtcgcgctcatcatcttctccaaccgcggcaagctctacgagttctccagcacgcagagcatgccaaaaacacttgaaaagtaccaaaaatgcagttttgcagggcctgaaacagcactccagaatagagagaatgagcaactgaaaagtagccgcaatgagtacctcaaactgaaggcacgtgttgataatttacagcggactcaaaggaacttgcttggtgaagatcttgagtcattaggcataaaagagctggagcacctggagaagcagctcgattcgtccttgaagcacataagatctacaaggacacaacacatggttgatcaactgacagaacttcagaaaaaagaacaaatgttttgtgaagcaaataagtgtcttcgaagaagactggaggagagcaaccaggttatatggcagcatgcgtgggagcaaagcgagcggcattctgaagtgcagccgcagcagctcaatggcaataacttcttccatcccctcgatggtgctggtgaacccacccttcagatagggtatccttcagaggcactgactagctcatgcatgaccaccttcctgcccccgtga

SEQ ID NO: 410 - protein, 271 aa, Zea mays
MFPATCSSASERGTAADLAAQAEGSAGAGKSAPNMGRGRVELKRIENKINRQVTFAKRRNGLLKKAYELSVLCDAEVALIIFSNRGKLYEFSSTQSMPKTLEKYQKCSFAGPETALQNRENEQLKSSRNEYLKLKARVDNLQRTQRNLLGEDLESLGIKELEHLEKQLDSSLKHIRSTRTQHMVDQLTELQKKEQMFCEANKCLRRRLEESNQVIWQHAWEQSERHSEVQPQQLNGNNFFHPLDGAGEPTLQIGYPSEALTSSCMTTFLPP

SEQ ID NO: 411 - DNA, 786 bp, Zea mays
  CDS (1)..(786)
atggcaacttccatgggttgtctcgtcttgctctgccttgtttcttctctccttcccagtgccgtccttggccacccatggggtggcttgttcccacagttctatgaccattcgtgccccaaggcgaaggagattgtgcagtccattgtggcacaggctgtggccaaggagaccaggatggcggcatctttagtcagactgcatttccatgactgctttgtcaagggctgcgatgcttcggtgctgttggacaacagcagcagcatagttagtgagaaagggtccaacccgaacaggaactccctcagggggtttgaggtgatcgaccagattaaggctgctcttgaggctgcctgcccaggcacagtctcctgtgccgacattgttgcccttgcggctcgtgattccaccgccctggttggtggaccatactgggacgtgccacttggccggagagactcgctcggtgcaagcatccagggctccaacaatgacatcccagcccccaacaacacactccccactatcatcaccaagttcaagcgccagggcctcaatgttgttgatgttgtcgccctctcaggtggtcacaccattggtatgtctcggtgcactagtttccggcagaggctatacaaccagacaggcaatggcatggctgacagcacactggatgtatcctacgccgcaaagctgaggcagggatgcccccgctctggtggtgacaacaacctcttccccttggacttcatcacccctgccaagtttgacaatttttactactga

SEQ ID NO: 412 - protein, 261 aa, Zea mays
MATSMGCLVLLCLVSSLLPSAVLGHPWGGLFPQFYDHSCPKAKEIVQSIVAQAVAKETRMAASLVRLHFHDCFVKGCDASVLLDNSSSIVSEKGSNPNRNSLRGFEVIDQIKAALEAACPGTVSCADIVALAARDSTALVGGPYWDVPLGRRDSLGASIQGSNNDIPAPNNTLPTIITKFKRQGLNVVDVVALSGGHTIGMSRCTSFRQRLYNQTGNGMADSTLDVSYAAKLRQGCPRSGGDNNLFPLDFITPAKFDNFYY

SEQ ID NO: 413 - DNA, 831 bp, Zea mays
  CDS (1)..(831)
atggcttattgcaagtctctgcaagaacctgctagagaggaacaagctggtatcgtcgccagcatgggtagaggaaggattgagatcaagaggatcgagaacaacacgagccggcaggtcaccttctgcaagcgccgcaatgggctcctcaagaaggcgtacgagctctccgtcctctgcgacgctgaggtggccctcatcgtcttctctagccgtggtcgcctctacgagtatgccaacaacagtgtcaaggctactgttgagaggtacaagaaggcacacaccgttggctcttcctctgggcccccgctcctagagcacaatgcccagcaattctaccagcaagaatcagcaaaactgcgcaaccagatccagatgctgcaaaacactaacaggcacttggttggtgactccgtgggaaacctgtcactcaaggagctgaagcagctggagagccgccttgagaaaggcatctctaagatcagggccaggaagagtgagctgctggctgcggagatcagttacatggccaaaagggagactgagcttcagaatgaccacatgaccctcaggaccaagattgaggagggagagcaacagctgcagcaggtgaccgtggcacggtcagttgcagcagcagcagctgccaccaacttggagctgaacccattcttggagatggataccaaatgcttcttcactggcggccccttcgcgacgctggacatgaagtgctttctccccggcagcttgcagcagatgctggaggcacagcagcgccagatgctcgccaccgagctgaacctcggctaccaactggcgccgccttga

SEQ ID NO: 414 - protein, 276 aa, Zea mays
MAYCKSLQEPAREEQAGIVASMGRGRIEIKRIENNTSRQVTFCKRRNGLLKKAYELSVLCDAEVALIVFSSRGRLYEYANNSVKATVERYKKAHTVGSSSGPPLLEHNAQQFYQQESAKLRNQIQMLQNTNRHLVGDSVGNLSLKELKQLESRLEKGISKIRARKSELLAAEISYMAKRETELQNDHMTLRTKIEEGEQQLQQVTVARSVAAAAAATNLELNPFLEMDTKCFFTGGPFATLDMKCFLPGSLQQMLEAQQRQMLATELNLGYQLAPP

SEQ ID NO: 415 - DNA, 672 bp, Zea mays
  CDS (1)..(672)
  misc_feature (4)..(7): n at positions 4, 6 and 7 is a or g or c or t/u
atgnanntgcaaagtcctggtggcagtgtactatggaatgggatcagcacgggtgcaaggcccagaaatttcaattcagactggtggtacggtgatgcttcatcattgagttttcccatgtataagaggttaatctccaccatggagtctcgaggcatccggcctgaaataattgctggttccttaacctactatgccaagaagtatcttccaggacttaggcgtcatagtcatagcatgggcacaatgcctcttactgctactctatctgaggttgaacaaaaaaaattacttgaggagatcgacaggcttttgcctcttcacaggggtatagcatcgacaaaagttctgcttgggctccttcgcactgccatgattctgaaagccagccccacgtgcatttctaacttggagaaacgaattggcatgcaactagaccaggccactttggaggatctgctgctgccaaatttctcctacacaatggaaacactgtacaatgtggagtgtgtgcacaggattcttgatcatttcttggcaatggaccaagcaaatggtggcgagtccccatgcttggatgatgtcatggcatccccatccttgacaccgatcacaagtgttgccaagctaattgacggctatcttgcagaaattgcaccagatatcatttga

SEQ ID NO: 416 - protein, 223 aa, Zea mays
  misc_feature (2)..(2): Xaa can be any amino acid
  misc_feature (3)..(3): Xaa can be Met or Leu or Val
MXXQSPGGSVLWNGISTGARPRNFNSDWWYGDASSLSFPMYKRLISTMESRGIRPEIIAGSLTYYAKKYLPGLRRHSHSMGTMPLTATLSEVEQKKLLEEIDRLLPLHRGIASTKVLLGLLRTAMILKASPTCISNLEKRIGMQLDQATLEDLLLPNFSYTMETLYNVECVHRILDHFLAMDQANGGESPCLDDVMASPSLTPITSVAKLIDGYLAEIAPDII

SEQ ID NO: 417 - DNA, 996 bp, Zea mays
  CDS (1)..(996)
atggagtctggacggctcatcttcaacgcgccgggctctggcgccgggcagatgctcttcctcgactgcggcgcaggcggcggtcccggcggcggcttgttccatcgaggcgggagaccgatgcttggccttgaagaagggcgcggcgtaaaacggcccttcttcacctcgcccgacgagctcctcgaggaagagtactacgacgagcagctgccggagaagaagcgccgcctcaccccagagcaggtgcttctgctggagaggagcttcgaggaggagaacaagctggagcccgagcgcaagacggagctggcgcgcaagctgggcctgcagcctcgccaggtggccgtctggttccagaaccgccgcgcccggtggaagaccaagcagctcgagcgcgacttcgaccgcctcaaggcctccttcgacgctctccgagcggaccacgacgccctcctccaggacaacaaccgcctccgctcacaggttgtgtcgttgaccgagaagctgcaagagaaggaggatgcgacggagggcggcgccaccgctgacaccgccgcgccggcggtggacgtcgaggcttccctggccgacgacgtcgaggagccagcagagcctgcggcgacgttcgaggtgctgcaggaggtgaagtccgaggacaggctgagcaccggcagcggcgggagcgcggtggtggacgcggacgcgctgctgtacggcaggttcgccgcggcagttgatagcagcgtggagtcgtacttccccggcggcgaggaccactaccacgactgcgggacgatgggccccgtgaaccatggcgccggaggaggcatccagtcggacgacgacggcgccggcagcgacgaggggtgcagctactacgccgacgaagccgccgccgccgccgccgccgcgttcttcgccggacacgccacccaccaccacgcggacgaggacgaggacgccggccagatcagctggtggatgtggaactga

SEQ ID NO: 418 - protein, 331 aa, Zea mays
MESGRLIFNAPGSGAGQMLFLDCGAGGGPGGGLFHRGGRPMLGLEEGRGVKRPFFTSPDELLEEEYYDEQLPEKKRRLTPEQVLLLERSFEEENKLEPERKTELARKLGLQPRQVAVWFQNRRARWKTKQLERDFDRLKASFDALRADHDALLQDNNRLRSQVVSLTEKLQEKEDATEGGATADTAAPAVDVEASLADDVEEPAEPAATFEVLQEVKSEDRLSTGSGGSAVVDADALLYGRFAAAVDSSVESYFPGGEDHYHDCGTMGPVNHGAGGGIQSDDDGAGSDEGCSYYADEAAAAAAAAFFAGHATHHHADEDEDAGQISWWMWN

SEQ ID NO: 419 - DNA, 696 bp, Zea mays
  CDS (1)..(696)
atgcatacacaggcacagatggcagagcataaagggaacgttctcttgcacaagtatgagatggggaaattgcttggccaaggcacctttgccaaggtttaccatgctcgtaacacggcgacttcagaaagtgtcgcgatcaaagtgattgacaaggagaaggttatgaaggttggtctcattgatcaaatccagcgagagatttctgcgatgaagctcgtcaggcacccaaacgtcgtgcagcttaacgaggtcatagccaccaagaccaaaatatacttcgtgttggagtatgttaaaggcggggagctcttggctaaagtaaagcgaggaaggcttaaggaagatgcagcgaggaagtacttccaacagctgatctgtgcggtggacttctgtcacagcaggggtgtctatcatcgagatttgaagccagaaaatcttttgctcgatgagaatagcaacctgaaggtatcagattttggtctaagcgcacttgctgaatgccatagacaagacggcctgctccacacgacttgtggcacgcctgcttatgttgccccagaggagattaacagaaagggttatgatggtgcaaaggctgacatatggtcttgtggggtcatcctatttgtgctattggctggttatcttccgttccatgataagaacttgatggacatgtataagaagatttga

SEQ ID NO: 420 - protein, 231 aa, Zea mays
MHTQAQMAEHKGNVLLHKYEMGKLLGQGTFAKVYHARNTATSESVAIKVIDKEKVMKVGLIDQIQREISAMKLVRHPNVVQLNEVIATKTKIYFVLEYVKGGELLAKVKRGRLKEDAARKYFQQLICAVDFCHSRGVYHRDLKPENLLLDENSNLKVSDFGLSALAECHRQDGLLHTTCGTPAYVAPEEINRKGYDGAKADIWSCGVILFVLLAGYLPFHDKNLMDMYKKI

SEQ ID NO: 421 - DNA, 837 bp, Zea mays
  CDS (1)..(837)
atggctctgccttgctttcctgctacctgctctagcgcgagcgagcgaggtacggcggccgatctggcggcgcaggcggagggctcggccggggccggcaagtcggcgccgaacatggggaggggccgggtcgagctcaagcggatcgagaacaagatcaaccgccaggtcaccttcgccaagcgccgcaacggcctgctcaagaaggcgtacgagctctcggtgctctgcgacgccgaggtcgcgctcatcatcttctccaaccgcggcaagctctacgagttctccagcacgcagagcatgccaaaaacacttgaaaagtaccaaaaatgcagttttgcagggcctgaaacagcactccagaatagagagaatgagcaactgaaaagtagccgcaatgagtacctcaaactgaaggcacgtgttgataatttacagcggactcaaaggaacttgcttggtgaagatcttgagtcattaggcataaaagagctggagcacctggagaagcagctcgattcgtccttgaagcacataagatctacaaggacacaacacatggttgatcaactgacagaacttcagaaaaaagaacaaatgttttgtgaagcaaataagtgtcttcgaagaagactggaggagagcaaccaggttatatggcagcatgcgtgggagcaaagcgagcggcattctgaagtgcagccgcagcagctcaatggcaataacttcttccatcccctcgatggtgctggtgaacccacccttcagatagggtatccttcagaggcactgactagctcatgcatgaccaccttcctgcccccgtggttgccatga

SEQ ID NO: 422 - protein, 278 aa, Zea mays
MALPCFPATCSSASERGTAADLAAQAEGSAGAGKSAPNMGRGRVELKRIENKINRQVTFAKRRNGLLKKAYELSVLCDAEVALIIFSNRGKLYEFSSTQSMPKTLEKYQKCSFAGPETALQNRENEQLKSSRNEYLKLKARVDNLQRTQRNLLGEDLESLGIKELEHLEKQLDSSLKHIRSTRTQHMVDQLTELQKKEQMFCEANKCLRRRLEESNQVIWQHAWEQSERHSEVQPQQLNGNNFFHPLDGAGEPTLQIGYPSEALTSSCMTTFLPPWLP

SEQ ID NO: 423 - DNA, 570 bp, Zea mays
  CDS (1)..(570)
  misc_feature (65)..(65): n at position 65 is a or g or c or t/u
atgacgacgcccggctcctgtcctgcgacaaccgccgccacccaccctcccatgtgcgccgctancgccgcaggtggatcgcaaaaaatggtgcgtccgcgactagtgctcttcggggactccatcaccgagcagtccttccgccccggtggctggggtgccgcactggctgatacctactcgcgcaaggctgatgtagttgtcagaggctatggtggatacaacacaagatgggctcttttcttagtacatcacatctttccgctggatggtttagcaccccctcttgcaaccactattttctttggagcaaatgacgcagccctgttaggaagaactggcgagcgacaacatgttccagtttcagaatataaaaataatctcaaaatgattgttaatcatttgaaggattgttctaattccatggttattgtgcttattacgccacctccaattgatgaagaaggaagagaaagatttgcacggtcactttatggacagaatgcgaggaagctacctgaaaggacaaatgaaatggctggggtctatgctggttattgcgtcgaatga

SEQ ID NO: 424 - protein, 189 aa, Zea mays
  misc_feature (22)..(22): Xaa can be Asn or Thr or Ser or Ile
MTTPGSCPATTAATHPPMCAAXAAGGSQKMVRPRLVLFGDSITEQSFRPGGWGAALADTYSRKADVVVRGYGGYNTRWALFLVHHIFPLDGLAPPLATTIFFGANDAALLGRTGERQHVPVSEYKNNLKMIVNHLKDCSNSMVIVLITPPPIDEEGRERFARSLYGQNARKLPERTNEMAGVYAGYCVE

SEQ ID NO: 425 - DNA, 1659 bp, Zea mays
  CDS (1)..(1659)
atgtgcccccactccctgtctcgcgcggcggccatgggaaactgctgccgctcgccggccgccgcggcgcgggaagacgtcaagtcgtcgcacttcccggcctccgccggcgggaagaagaagccccaccagcaggcgcggaacggcggccccggctccggggagaagaagcgtctgtcggtgctcggggaggaggggtgcgacgtgggcgcgggcgggatcgagagagaagtacgcgctggaccgggagctggggcgcggcgagttcggggtgacgtacctgtgcatggaccggggcacgcgggagctgctcgcctgcaagtccatctccaagcgcaagctgcggacggccgtcgacgtggaggacgtgcgccgggagtggccatcatgcgccacctgcccaagagccccagcgtcgtgtccctgcgggaggcgtgcgaggacgagggcgccgtgcacctcgtcatggagctctgcgagggcggcgagctcttcgaccgcatcgtcgcgcgggggcactacaccgagcgcgccgccgccagtgtcacccgcaccatcgtcgaggtcgtccagctctgccaccgccacggcgtcatccaccgggacctcaagccggagaacttcctcttcgccaataagaaggagaactcgccgctcaaggccatcgacttcggtctctccatcttcttcaagcctggtgaaaagttttcagaaattgtgggaagtccctactacatggctcctgaagtcttgaagaggaactatggacctgaaatagacatatggagcgctggtgttatcttgtatattttgttatgtggcgttcctccgttttgggctgagactgaacaaggagttgcacaagctattctccggggaaatatagattttaagcgagaaccctggcccaatgtttctgacaatgctaaagatcttgttcggcagatgcttcaacctgatccaaaactcaggctaacagcaaagcaagttcttgagcatccctggcttcaaaatgctaagaaagctccaaatgttcctcttggagacattgtaaagtcaaggctgaaacagttttcaaggatgaacagattcaaaagaaaagctctaagggttattgctgatcacttgtcagctgaagaggttgaggacataaaggatatgttcaaggtgatggatactgataatgatggcatagtttcttatgaagagttaaagagtgggatcgcaaattttggttctcatcttgcagaatcagaagtgcaaatgcttatcgaagctgtggatacaaatggtagaggagcactagattacggtgaatttttggctgtctcgctccatttacaaaggatggcaaatgacgagcaccttcggcgggccttcctatttttcgacaaggatggcaacggtttcatcgagcccgaggagcttcaggaagccctgatggaggacgggggagctgataccatggacgtggtcaatgacatattgcaagaagttgacacagacaaggatgggaaaattagctacgacgaatttgtagcgatgatgaaaactggcacggactggaggaaggcatcgcggcactattcaagagggcgcttcaatagccttagcataaagcttataaaagacgggtctgtaaagctgggtagcgagtga

SEQ ID NO: 426 - protein, 552 aa, Zea mays
MCPHSLSRAAAMGNCCRSPAAAAREDVKSSHFPASAGGKKKPHQQARNGGPGSGEKKRLSVLGEEGCDVGAGGIEREVRAGPGAGARRVRGDVPVHGPGHAGAARLQVHLQAQAADGRRRGGRAPGVAIMRHLPKSPSVVSLREACEDEGAVHLVMELCEGGELFDRIVARGHYTERAAASVTRTIVEVVQLCHRHGVIHRDLKPENFLFANKKENSPLKAIDFGLSIFFKPGEKFSEIVGSPYYMAPEVLKRNYGPEIDIWSAGVILYILLCGVPPFWAETEQGVAQAILRGNIDFKREPWPNVSDNAKDLVRQMLQPDPKLRLTAKQVLEHPWLQNAKKAPNVPLGDIVKSRLKQFSRMNRFKRKALRVIADHLSAEEVEDIKDMFKVMDTDNDGIVSYEELKSGIANFGSHLAESEVQMLIEAVDTNGRGALDYGEFLAVSLHLQRMANDEHLRRAFLFFDKDGNGFIEPEELQEALMEDGGADTMDVVNDILQEVDTDKDGKISYDEFVAMMKTGTDWRKASRHYSRGRFNSLSIKLIKDGSVKLGSE

SEQ ID NO: 427 - DNA, 750 bp, Zea mays
  CDS (1)..(750)
  misc_feature (16)..(163): n at positions 16 and 163 is a or g or c or t/u
atggaagcgccctgcngtacccgtaccgcctccccaaggccggtcgcgggctggagctgcagacgcacgctttccacgcctgcacaccaccaccacgcgcggccgtcacccagagctcgggttgtcgccgtccgagccgccggcactcagcgggcgacctggntgcccggactggacccgcccccatacctcgacggcacactaccaggtgacttcggcttcgaccctctgggcctcggcgaggagcccgaagccttgaagtggtacgttcaggccgagctcgtgcactgccggttcgccatggcaggggtcgccggcatccttttcactgacttgctccgcgtatcagggaacagcgacctccccgtgtggttcgaagcaggcgcggcgaaattcgacttcgcgaacaccacggcgctcttcttcgtccagctcttcttgatggggttcgctgaaaccaagaggtacatggacttcaaaaatccaggatcgcaagcagaggaagggacattcatagggttagaggctgcactcgcaggtcaacagccaggctaccccgggggtccactgttcaatccactaggactcgcaaaggatatagagaatgctcatgacgagaagctcaaagaaatcaagaacgggaggttggcaatggtagccatgcttggcttcatggtgcaagcatccgtaactcatgccggccccatcgacaatctcttgacacacctttcggacccgttcaacaaatga

SEQ ID NO: 428 - protein, 249 aa, Zea mays
  misc_feature (6)..(6): Xaa can be Arg or Cys or Ser or Gly
  misc_feature (55)..(55): Xaa can be Met or Leu or Val
MEAPCXTRTASPRPVAGWSCRRTLSTPAHHHHARPSPRARVVAVRAAGTQRATWXPGLDPPPYLDGTLPGDFGFDPLGLGEEPEALKWYVQAELVHCRFAMAGVAGILFTDLLRVSGNSDLPVWFEAGAAKFDFANTTALFFVQLFLMGFAETKRYMDFKNPGSQAEEGTFIGLEAALAGQQPGYPGGPLFNPLGLAKDIENAHDEKLKEIKNGRLAMVAMLGFMVQASVTHAGPIDNLLTHLSDPFNK

SEQ ID NO: 429 - DNA, 450 bp, Zea mays; identical to SEQ ID NO: 179
  CDS (1)..(450)
  misc_feature (402)..(447): n at positions 402 and 447 is a or g or c or t/u

SEQ ID NO: 430 - protein, 149 aa, Zea mays; identical to SEQ ID NO: 180
  misc_feature (134)..(134): Xaa can be Asp or Glu

SEQ ID NO: 431 - DNA, 678 bp, Zea mays
  CDS (1)..(678)
  misc_feature (660)..(660): n at position 660 is a or g or c or t/u
atggggagtggagaacggagtatggggcgcggcaagatcgagatcaagaggatcgagaactctaccaaccggcaggtgaccttctccaagcgccgggccggactggtcaagaaggcacgggagatcggcgtgctctgcgacgccgaggtcggcgtcgtcatcttctccagcggcggcaagctctacgactactgctcgcccaggacctcgctgtccaggatcttggagaagtaccagaccaactccgggaagattctgtggggtgagaagcacaagaacctgagtgcagagatcgacagagtcaagaaggagaacgacaacatgcagattcagctcaggcatctgaaaggcgaggacctgaactccctgcagcccagggagctgatcgctattgaagagggcctccagaatgggcagaccaacatgcgcgagaagcagatggactactggaggatgcacaagacgaatgggaagatgctggaggacgaacacaagatactgacttttaggatgcaccaacaggctgttgatctgagcggcggcatgagggagctggagaccggataccatcaggtccagcacgacagggatttcatttcccagatgccgttcaccttccgggtgcagcccaaccaccccaacctgcaggaagacgagtanctacagcctgctggatga

SEQ ID NO: 432 - protein, 225 aa, Zea mays
  misc_feature (220)..(220): Xaa can be any amino acid
MGSGERSMGRGKIEIKRIENSTNRQVTFSKRRAGLVKKAREIGVLCDAEVGVVIFSSGGKLYDYCSPRTSLSRILEKYQTNSGKILWGEKHKNLSAEIDRVKKENDNMQIQLRHLKGEDLNSLQPRELIAIEEGLQNGQTNMREKQMDYWRMHKTNGKMLEDEHKILTFRMHQQAVDLSGGMRELETGYHQVQHDRDFISQMPFTFRVQPNHPNLQEDEXLQPAG

SEQ ID NO: 433 - DNA, 768 bp, Zea mays
  CDS (1)..(768)
atggatcaggagagggagaaggcggcggcgatggggcgcgggaaggtgcagctgaagcggatcgagaacaagatcaaccgccaggtgacattctccaagcgccgctcggggctactcaagaaggcgcacgagatctccgtgctctgcgacgccgaggtcgcgctcatcatcttctccaccaagggcaagctctacgagtactctaccgattcatgtatggacaaaattcttgaacggtatgagcgctactcctatgcagaaaaggttctcatttccgcagaatatgaaactcagggcaattggtgccatgaatatagaaaactaaaggcgaaggtcgagacaatacagaaatgtcaaaagcacctcatgggagaggatcttgaaacgttgaatctcaaagagcttcagcaactagagcagcagctggagagttcactgaaacatatcagaaccaggaagaaccaacttatgctcgagtcaatttcggagctccaacggaaggagaagtcgctgcaggaggagaacaaggttctgcagaaggagctcgcggagaagcagaaagcccagcggaagcaagtgcaatggggccaaacccaacagcagaccagttcgtcttcctcgtgcttcgtgataagggaagctgccccaacaacaaatatcagcatttttcctgtggcagcaggcgggaggttggtggaaggtgcagcagcgcagccgcaggctcgcgttggactaccaccatggatgcttagccacctgagcagctga

SEQ ID NO: 434 - protein, 255 aa, Zea mays
MDQEREKAAAMGRGKVQLKRIENKINRQVTFSKRRSGLLKKAHEISVLCDAEVALIIFSTKGKLYEYSTDSCMDKILERYERYSYAEKVLISAEYETQGNWCHEYRKLKAKVETIQKCQKHLMGEDLETLNLKELQQLEQQLESSLKHIRTRKNQLMLESISELQRKEKSLQEENKVLQKELAEKQKAQRKQVQWGQTQQQTSSSSSCFVIREAAPTTNISIFPVAAGGRLVEGAAAQPQARVGLPPWMLSHLSS

SEQ ID NO: 435 - DNA, 1230 bp, Zea mays
  CDS (1)..(1230)
atgccagagcaccatccactcttcggtggcgaggccgcgggcccctcgagacgggcaatgcagagcgcggctgccatcgggctcctacggccatgtgccgcgcggccgctcgccgcctacactagcccacgccgcggcgccggcgcgtgcagcggcggcacccagccgatcatcacgccccgcggcatccgcctctccgcccgccccggtctcgtgccggcctcgccgctggaggagaaggagaaccggagatgcagggccagtatgcacacggcggcgtcggccggagaggaagctgggggagggctcgccaagacgctgcagctgggggcgctcttcgggctctggtacctcttcaacatctacttcaacatctacaacaagcaggttctgaaggttttgccataccctataaacatcacaacagtgcagtttgccgttggaagtgccattgctttgttcatgtggatcaccggtatccataaaaggccaaagatttcgggtgcccagcttttcgctatccttcctctagctatcgtccataccatgggcaatcttttcacaaacatgagccttggaaaggttgcggtgtcatttacacatactataaaggccatggaacctttcttctcagttctcctttcagcaattttccttggggagttgcctacgccatgggttgtgttgtctcttcttccgattgttggtggtgtagctttggcatcccttactgaggcctcctttaactgggctggattttggagtgcaatggcttcaaatgtaaccttccagtcaaggaatgtgctaagcaagaaacttatggtgaagaaagaggaatctctcgacaacattaatctattttcgataattacagtcatgtcattcttcctgttggccccggtaaccttacttacagaaggtgttaaagttagtccagcagttttgcagtctgctggtttgaacttgaaacagatatacacaaggtcattgattgctgcatgctgcttccatgcataccaacaggtgtcatacatgatcctcgccagggtatccccagtcacacattcagtgggcaattgcgtcaagcgtgtggtggtcattgtgacctctgttctgttcttcaggacccctgtttctcccatcaactctctcggtaccgggatcgctcttgctggagttttcctatactcgcaattgaagagacttaagcccaagcccaagactgcttga

SEQ ID NO: 436 - protein, 409 aa, Zea mays
MPEHHPLFGGEAAGPSRRAMQSAAAIGLLRPCAARPLAAYTSPRRGAGACSGGTQPIITPRGIRLSARPGLVPASPLEEKENRRCRASMHTAASAGEEAGGGLAKTLQLGALFGLWYLFNIYFNIYNKQVLKVLPYPINITTVQFAVGSAIALFMWITGIHKRPKISGAQLFAILPLAIVHTMGNLFTNMSLGKVAVSFTHTIKAMEPFFSVLLSAIFLGELPTPWVVLSLLPIVGGVALASLTEASFNWAGFWSAMASNVTFQSRNVLSKKLMVKKEESLDNINLFSIITVMSFFLLAPVTLLTEGVKVSPAVLQSAGLNLKQIYTRSLIAACCFHAYQQVSYMILARVSPVTHSVGNCVKRVVVIVTSVLFFRTPVSPINSLGTGIALAGVFLYSQLKRLKPKPKTA

SEQ ID NO: 437 - DNA, 747 bp, Zea mays
  CDS (1)..(747)
atggcgctcgcgcccacttccgctgccgtgctcaagaccccgttcctcggggccaggcgcgcgctcgccaatgccgccgccaagcccgcgcctcgccgcgcgctggtcgtcgccgccgcggccgccgccaagaagtcgtggatcccggccatcaagagcgacgccgagatcgtgaacccgccctggctcgacggctcgctccccggcgacttcgggttcgacccgctggggctgggcaaggacccggcgttcctcaagtggtaccgggaggcggagctgatccacgggcggtgggcgatggcggccgtgctgggcatcttcgtggggcaggcgtggagcggcatcccgtggttcgaggccggcgcggacccgagcgccatcgcgcccttctccttcgggtcgctgctgggcacgcagctgctgctgatggggtgggtggagtcgaagcggtgggtggacttcttcaacccggactcccaggccgtggagtgggccacgccatggtcccgcaccgccgagaacttcgccaacttcaccggcgagcagggctacccgggcggcaagttcttcgacccgctcggcctcgccggcaccgtcaaggacggcgtctacatccccgacgtcgacaagctcgagcggctcaagctggccgagatcaagcacgcccgcatcgccatgcttgccatgctcgccttctacttcgaggccggacagggcaagacgccgctcggcgcgctcggcctatga

SEQ ID NO: 438 - protein, 248 aa, Zea mays
MALAPTSAAVLKTPFLGARRALANAAAKPAPRRALVVAAAAAAKKSWIPAIKSDAEIVNPPWLDGSLPGDFGFDPLGLGKDPAFLKWYREAELIHGRWAMAAVLGIFVGQAWSGIPWFEAGADPSAIAPFSFGSLLGTQLLLMGWVESKRWVDFFNPDSQAVEWATPWSRTAENFANFTGEQGYPGGKFFDPLGLAGTVKDGVYIPDVDKLERLKLAEIKHARIAMLAMLAFYFEAGQGKTPLGALGL

SEQ ID NO: 439 - DNA, 843 bp, Zea mays
  CDS (1)..(843)
  misc_feature (57)..(735): n at positions 57 and 735 is a or g or c or t/u
atgtcagcggaagcagcaatggtgatggcgtcgtcgagcgggctgaggagctgcagngccgtgggcgtgcccagcctgctggcgccgtcgtcccggtccggccgcctggcgccgttctgcgccaacgccaccacctctggccgcgtcaccatgtccgcggagtggatgcccggccagccacgccctgcccacctcgacggctcctctcccggggacttcggcttcgatccgctgggcctcgcgaccgtgccggagaacttcgagcggttcaaggagtcagaggtgtaccactgccgctgggccatgcttgccgtccccgggatcctggtgccggaagctctgggcctgggcaactgggtgaaggcgcaggagtgggcggccgtccccggcgggcaggccacgtacctgggcgccccggtgccgtggggcacgctgccgaccatcctggtgatcgagttcgtggccatcgccttcgccgagcaccagcgcaccatggagaaggaccccgagaagaagaagtaccccggcggcgccttcgacccgctcggcttctccaaggaccccgccaagttcgaggagtacaagctcaaggagatcaagaacggccgcctcgccatgctggccttcgtcggcttctgcgtccagcagtcggcgtaccccggcaccggcccgctggagaacctcgcctcccacctcgccgacccgtggcacaacaacatcggcgacatcatcatnccccagatcaatctccccttgagctcagctcagctgctggttgctgtttcctgtgtacgactaggccctgcctgtacaacgagcgacgacggtgacttcccgccctga

SEQ ID NO: 440 - protein, 280 aa, Zea mays
  misc_feature (19)..(19): Xaa can be Arg or Ser
  misc_feature (245)..(245): Xaa can be Ile or Met
MSAEAAMVMASSSGLRSCXAVGVPSLLAPSSRSGRLAPFCANATTSGRVTMSAEWMPGQPRPAHLDGSSPGDFGFDPLGLATVPENFERFKESEVYHCRWAMLAVPGILVPEALGLGNWVKAQEWAAVPGGQATYLGAPVPWGTLPTILVIEFVAIAFAEHQRTMEKDPEKKKYPGGAFDPLGFSKDPAKFEEYKLKEIKNGRLAMLAFVGFCVQQSAYPGTGPLENLASHLADPWHNNIGDIIXPQINLPLSSAQLLVAVSCVRLGPACTTSDDGDFPP

SEQ ID NO: 441 - DNA, 552 bp, Zea mays
  CDS (1)..(552)
atgtccccctgcggcgatgctgcggcggcagccgagctcaccagcctgcgcatcagcgaaggagctgggatccctccgcttcccggacggcgaagcgtcggcggcaatgcagctgagggagaagaggagggtgataagaacaagaaggcgaggaagggtaaggctggtacgcagcggatcgccgggtgggggctccgcgagttcagcaagatagtttctaaaaaggttgagaccaaaggacggactacttacagtgaggttgcagatgaaatttgtggagagctgaagttgactcttattggtcaagagtttgatgagaagaatatcaggaggagagtgtatgatgcttttaatgtgctaattgcactacgtgttatcacaaaagatgaaaaagagataaaatggatgggcttgtctaatttccaatatgaaaagataaagttggaggaaactcgcaaagaactcatgatcaggattaagaacaagaaaaaacttctccaggaaattgaaagacagcttgatgacctccagaatatcaagtttcgcaactga

SEQ ID NO: 442 - protein, 183 aa, Zea mays
MSPCGDAAAAAELTSLRISEGAGIPPLPGRRSVGGNAAEGEEEGDKNKKARKGKAGTQRIAGWGLREFSKIVSKKVETKGRTTYSEVADEICGELKLTLIGQEFDEKNIRRRVYDAFNVLIALRVITKDEKEIKWMGLSNFQYEKIKLEETRKELMIRIKNKKKLLQEIERQLDDLQNIKFRN

SEQ ID NO: 443 - DNA, 840 bp, Zea mays
  CDS (1)..(840)
  misc_feature (32)..(607): n at positions 32 and 607 is a or g or c or t/u
atggaactgctaagttcatcagctcctcattngggggtgaaggcctggaagatggtggcgtggccagggtcggcgaggtgggcgaagaggttgtcgatggggccggtgcctgtgtactcggcctggaaccaagcgcccatgacggcgagcatggcgaggcgtccgttcttgatctccttggtgcgcagctccttgatcttctccggcgagccggagccccagccgagcgggtcaaaccacaggccaccagggtacccgacgtcggtgccggtgagcttgttgctggggaagatgggatcggtgttgacgcttccgggcttgatgatgtcagcccagcggcggccctcggcccagccgatgaggatgagctcgatgatgaagagggtggtggtgtcggtgaagtactgctgttcgccggcggtgtaccaggagggcgtgttgaggacgccgatcttggtcaggaactccgggatgaagatgcccgccgcgccgagcatcgcccaccggcagtgcaccagctccgcctgcacgttccaccgcaggctctccgggtcagatccgaggccccagggatcaaagccgaagtcgccgggaaggctgccgtcgngccacggtggaggggtgctgccggggaaccagatcggcctgtcggaatccgccgtcggcgcgcacggcgaacgacggccgggctgcctcggcctgcctcagcagcgtcttgccgacgaggaaggaggaagaggaggaggaggagaacaacgacgacgacgcccgctgctgcccattcctggggagcgccgcgacggcggtggtggaggacgaggaggcggacacgagtgctga

SEQ ID NO: 444 - protein, 279 aa, Zea mays
  misc_feature (11)..(11): Xaa can be any amino acid
  misc_feature (203)..(203): Xaa can be Ser or Arg or Gly or Cys
MELLSSSAPHXGVKAWKMVAWPGSARWAKRLSMGPVPVYSAWNQAPMTASMARRPFLISLVRSSLIFSGEPEPQPSGSNHRPPGYPTSVPVSLLLGKMGSVLTLPGLMMSAQRRPSAQPMRMSSMMKRVVVSVKYCCSPAVYQEGVLRTPILVRNSGMKMPAAPSIAHRQCTSSACTFHRRLSGSDPRPQGSKPKSPGRLPSXHGGGVLPGNQIGLSESAVGAHGERRPGCLGLPQQRLADEEGGRGGGGEQRRRRPLLPIPGERRDGGGGGRGGGHEC

SEQ ID NO: 445 - DNA, 849 bp, Zea mays
  CDS (1)..(849)
  misc_feature (395)..(785): n at positions 395 and 785 is a or g or c or t/u
atgacgcggcggcaggacgggcacattgtgagggtggcggcggccgaggcgggctgcgcggcggccgacgacggcggcgcggccttgagcgccctgaggtcggcgagctccttctcgaggcgcttgttctcgtcggcgaggcggtcgcaccagcgcttgaggtactcgcagtccacctccgtctgcttcagcttggtccgcgcgcggcggttctggaaccacacctccacctgccgcggccggaggcccaggcggttggccagctgcaccttctgcttctgcaacacccgagaccacacgacaaaaaaattatcagacacaccgccgggacaagatcgcatcgaacctgccgcgaccgacggcgaggaggaaagggtgggagggatgctagcttncggggttgagcgtgctgtgcgtcttgaagcactcctcgaggacggcggcctggtccttggagagcctgagcttcttgcgcccgccggcgccgccgtccgcgccgtcctcctcgtcgctgcggacgcctccggagccggtgcgctcgagctccccctccctctccctcttggcggtggtggtgtcgccgctgtcgggcgacgtggacgcgcgcatcgtcatcgcggcgccggcgtggtgctgcgcgtacgcgtcaccccgcgccctggcgacgtcggccacgacggagctcagcgcggctgcccagggggaggagccggcggtggtggtggaggaggagaggctgccctgggaggtgagggtgaggcccaggctgaggccgaggtcgaggntagcgctggcctggggcatcatcctgagacgactgtgagggtgaggcgagggctcggcaactga

SEQ ID NO: 446 - protein, 282 aa, Zea mays
  misc_feature (132)..(132): Xaa can be Tyr or Ser or Cys or Phe
  misc_feature (262)..(262): Xaa can be Asp or Ala or Gly or Val
MTRRQDGHIVRVAAAEAGCAAADDGGAALSALRSASSFSRRLFSSARRSHQRLRYSQSTSVCFSLVRARRFWNHTSTCRGRRPRRLASCTFCFCNTRDHTTKKLSDTPPGQDRIEPAATDGEEERVGGMLAXGVERAVRLEALLEDGGLVLGEPELLAPAGAAVRAVLLVAADASGAGALELPLPLPLGGGGVAAVGRRGRAHRHRGAGVVLRVRVTPRPGDVGHDGAQRGCPGGGAGGGGGGGEAALGGEGEAQAEAEVEXSAGLGHHPETTVRVRRGLGN

SEQ ID NO: 447 - DNA, 993 bp, Zea mays
  CDS (1)..(993)
atgtgtggtagcactcctcgaactgccaagttcatcagagctcctcatttgggggtgaaggcctggaagatggtggcgtggccagggtcggcgaggtgggcgaagaggttgtcgatggggccggtgccggtgtactcggcctggaaccaagcgcccatgacggcgagcatggcgaggcgtccgttcttgatctccttggtgcgcagctccttgatcttctccggcgagccggagccccagccgagcgggtcaaaccacaggccaccagggtacccgacgtcggtgccggtgagcttgttgctggggaagatgggatcggtgttgacgcttccgggcttgatgatgtcagcccagcggcggccctcggcccagccgatgaggatgagctcgatgatgaagagggtggtggtgtcggtgaagtactgctgctcgccggcggtgtaccagaagggcgtgttgaggacgccgatcttggtcagaaactccgggatgaagatgcccgccgcgccgagcatcgcccaccggcagtgcaccagctccgcctgcacgttccaccgcaggctctccgggtcagatccgaggccccagggatcaaagccgaagtcgccgggaaggctgccgtcgagccacggcggaggggtgctgccggggaaccagatcggcctgttggggtccgccgcggcgcgcacggcgaacgacggccgggccgcctcggcctgtctcagcagcgtcttgccgccgaggaaggaggacgacgcccgctgcccattcctggggagcgccgtgacggcggtggtggaggacgaggaggcggagacgagtgccattgcgggcgcaagctgtggcgtgggggatctgtggtgcgcggtgcacggcagtttaagggatctcgccggagcggggccggcttatccgcgaggggatagcgggcgcagccgcctcgtgccacgcggcgcggagaatctgctcgtttggctctggccacggctttga

SEQ ID NO: 448 - protein, 330 aa, Zea mays
MCGSTPRTAKFIRAPHLGVKAWKMVAWPGSARWAKRLSMGPVPVYSAWNQAPMTASMARRPFLISLVRSSLIFSGEPEPQPSGSNHRPPGYPTSVPVSLLLGKMGSVLTLPGLMMSAQRRPSAQPMRMSSMMKRVVVSVKYCCSPAVYQKGVLRTPILVRNSGMKMPAAPSIAHRQCTSSACTFHRRLSGSDPRPQGSKPKSPGRLPSSHGGGVLPGNQIGLLGSAAARTANDGRAASACLSSVLPPRKEDDARCPFLGSAVTAVVEDEEAETSAIAGASCGVGDLWCAVHGSLRDLAGAGPAYPRGDSGRSRLVPRGAENLLVWLWPRL

SEQ ID NO: 449 - DNA, 1575 bp, Zea mays
  CDS (1)..(1575)
atgccacgcgtccgcttccacagggagtccggggccatgcagagctccgtaaagctcgcggtgcttgctcttctgctagcggcagcagctcaccacggtctgctgccgctgccgacggcgcgatgctactggctcaacccggagatctacgacgccggcgggctgagccgccgcgcgttcccggacggcttcgtcttcgggacggccgcgtcggcgtaccaggtcgaggggatggccaagcacggcgggcggggccccagcatctgggacgccttcatagaggttcccgggaccatccctaacaatgccaccgctgacgtgacggtcgacgagtatcatcggtacaaggaagatgtgaacataatgaagaacatgggctttgatgcgtaccggttttcgatctcttggtcgaggattttcccagatggaactggcaaggtgaaccaggaaggagtggattactacaacaggctcatagattacatgctccagcaaggtatcgcgccgtatgcaaatctctaccattatgacctcccattggcactccatgaacagtacctgggctggcttagcccaaagattgtggaggcgtttgcagactacgccgagttctgcttccacgcgttcggagacagggtgaagaactggtttaccttcaacgagccgaggtgcgtcgctgctctgggctacgacaatggcttgcacgcaccgggaaggtgttccgggtgccccgccggaggcaactccaccacggagccgtaccttgtcgcacaccatctcatcctttctcatgcagctgcggtcaggcgataccgcgacaagtatcagcttcaccagaaggggaagattggaattctcctggatttcgtgtggtacgaacctttcagcgacagcaatgcggaccaggctgcagcacagcgagccagggacttccacctaggctggttccttgaccccattgtacatggacggtacccgtactcgatgcaagagattgccaaagacaggctaccgttgttcagcgatgaagaagccaggatggtgaaaggctctatagactatgttggcatcaaccactacacttctttctacatgaaggaccctgggacatggaacctgacgccagtcagctaccaggatgattggcatgttggttttgtctacgaacgaaatggagttcctattggcgctcacgcaaactcctactggttgtacattgtgccgtggggcatcaacaaggctgtcagctatgtcaaggaaacttacaaaaatcctacaatgatccttgctgaaaacggaatggaccaacctggtgatgtcagtattactcagggtgtgcatgatacagtaagaatccgttattacagagactacataactgagctcaagaaggcaatagatgatggtgccagagtcattgggtactttgcgtggtcgctgcttgacaacttcgagtggaggcttgggtacacttcgcggtttggcttggtgtacgtggactacaagactctgaagaggtaccccaaggattcagctttctggttcaagcatatgctgtccaagaaaaggagctga

SEQ ID NO: 450 - protein, 524 aa, Zea mays
MPRVRFHRESGAMQSSVKLAVLALLLAAAAHHGLLPLPTARCYWLNPEIYDAGGLSRRAFPDGFVFGTAASAYQVEGMAKHGGRGPSIWDAFIEVPGTIPNNATADVTVDEYHRYKEDVNIMKNMGFDAYRFSISWSRIFPDGTGKVNQEGVDYYNRLIDYMLQQGIAPYANLYHYDLPLALHEQYLGWLSPKIVEAFADYAEFCFHAFGDRVKNWFTFNEPRCVAALGYDNGLHAPGRCSGCPAGGNSTTEPYLVAHHLILSHAAAVRRYRDKYQLHQKGKIGILLDFVWYEPFSDSNADQAAAQRARDFHLGWFLDPIVHGRYPYSMQEIAKDRLPLFSDEEARMVKGSIDYVGINHYTSFYMKDPGTWNLTPVSYQDDWHVGFVYERNGVPIGAHANSYWLYIVPWGINKAVSYVKETYKNPTMILAENGMDQPGDVSITQGVHDTVRIRYYRDYITELKKAIDDGARVIGYFAWSLLDNFEWRLGYTSRFGLVYVDYKTLKRYPKDSAFWFKHMLSKKRS

SEQ ID NO: 451 - DNA, 723 bp, Zea mays
  CDS (1)..(723)
atgcggccgcggctggtgctcttcggcgactccataaccgagctgtccttcgcgtccggcggatggggggccgcgctcaccgaccgcttcgcccgccaggctgacgtggtgctgcgcgggctcagcggctacaacacgcggtgggcgctcaaggtgctgccgcgggccatggagggcgcggcgggcgcgggcgcggacccggcggccgtgacagtcttcttcggcgccaacgacgcctctctgcccgaccaggtgcaggcgcaccagcacgtgccgctcaaggagtaccagagcaacctccgcgccatctgcgcctatttcaaggagcgatggccctccactgctgtcatactcatcactcccccaccgatttacgagccagcgagaatccgagacatgtatggagacgacgagccttcacgccaaccagaaaggagcaatgaggctgccggcgcttacgcacaggcatgcatagatgttgccacagaattgaaccatccagttatagacatctggaccaagatgcaggaatttccagactggcaaacatctgcattgagcgacgggctccacttcaccccggtaggaaacaagatcctgttcgaggaggtggtgaagacgctggagacgagcatcggtttcagccaggagcggctcccgtcggacctcccgctgttccacgagatcgaccccaaggaccccatgaaagccttcggagcttga

SEQ ID NO: 452 - protein, 240 aa, Zea mays
MRPRLVLFGDSITELSFASGGWGAALTDRFARQADVVLRGLSGYNTRWALKVLPRAMEGAAGAGADPAAVTVFFGANDASLPDQVQAHQHVPLKEYQSNLRAICAYFKERWPSTAVILITPPPIYEPARIRDMYGDDEPSRQPERSNEAAGAYAQACIDVATELNHPVIDIWTKMQEFPDWQTSALSDGLHFTPVGNKILFEEVVKTLETSIGFSQERLPSDLPLFHEIDPKDPMKAFGA

SEQ ID NO: 453 - DNA, 1590 bp, Zea mays
  CDS (1)..(1590)
atgagcagctgcctgcctgctccgaggcgccacccagctcttcctcgccccagcagccgcttcccgagatccttttcactttcaccaccagggtacatagaccgcatctgcgggctctgcgctcctcggactcgatttgttggttcatccatccagctgccgccggacgtcgatcagctacctatcttgaaaccacaggaccgagcgtggaaactcccggaccggacattccattttccattccgaaggggggtgagaaggcggggaatgagtacaaccaaggtgaagagacgtgtgggcaagtatgagctcggccggaccataggcgagggcaccttcgcgaaggtcaggttcgcgagggacacggtcaccggcgaggccgtggccattaagatcctggacaaggagaaggtcctcaggcacaagatggttgagcagatcaagcgggagatctcgacgatgaagctgatcaagcaccctaacgtcgtccgcatatacgaggtgatgggaagtaaaacaaagatctacattgtgttagaattcgctaccggtggcgagctctttgatacaattgttaaccatggtcgaatgagggaagacgaggcaaggaggtacttccaacagttaatcaatgcagttgattattgtcatagcaggggtgtgtaccaccgggatttaaaacctgaaaatttgctgcttgattcatatggtaacctgaaggtctctgactttgggctcagcgcgctatctcagcaaatcaaggatgatggactgctgcacacaacttgtgggactccaaactatgttgcaccagaggtccttgaagatcaaggctacgatggagcaatggctgatctgtggtcatgtggagttatcctgtttgttctgctagcagggtatttgccgtttgaggaatctaatctcatgactttgtataagaaaatatcaaatgcagaatttacatttccaccatggacatcttttcctgccaagaggttgttaacaagaatccttgatccaaatccaatgacgagaataacaatcccagaaatattagaggatgagtggttcaaaaagggctacaagcgcccagaatttgatgaacaatatgacaccacattggatgatgtggatgccgtcttcaatgattcagaagagcaccatgtgacagaaaagaaagaagaagaaccagtagctctgaacgcattcgaactgatttcgatgtcagcgggcctaaaccttggaaacttatttgactcagagcaggagttcaaaagagaaacaaggtttacatcaaaatgtccccccaaagaaattgtccgcaagatcgaggaagctgcaaaacctctaggatttgatgttcagaagaaaaattacaagttgaggctcgaaaaggtaaaggcagggaggaagggaaacctcaacgttgctactgagatactgcaagttgcgccctctctccacatggtagaagtccgaaaagcaaagggtgacactctggaatttcataagttctacaagaacctttccaagaccttgaaggacgtcgtctggaaatccgacgatcttcaaacgcaacatgcttcttga

SEQ ID NO: 454 - protein, 529 aa, Zea mays
MSSCLPAPRRHPALPRPSSRFPRSFSLSPPGYIDRICGLCAPRTRFVGSSIQLPPDVDQLPILKPQDRAWKLPDRTFHFPFRRGVRRRGMSTTKVKRRVGKYELGRTIGEGTFAKVRFARDTVTGEAVAIKILDKEKVLRHKMVEQIKREISTMKLIKHPNVVRIYEVMGSKTKIYIVLEFATGGELFDTIVNHGRMREDEARRYFQQLINAVDYCHSRGVYHRDLKPENLLLDSYGNLKVSDFGLSALSQQIKDDGLLHTTCGTPNYVAPEVLEDQGYDGAMADLWSCGVILFVLLAGYLPFEESNLMTLYKKISNAEFTFPPWTSFPAKRLLTRILDPNPMTRITIPEILEDEWFKKGYKRPEFDEQYDTTLDDVDAVFNDSEEHHVTEKKEEEPVALNAFELISMSAGLNLGNLFDSEQEFKRETRFTSKCPPKEIVRKIEEAAKPLGFDVQKKNYKLRLEKVKAGRKGNLNVATEILQVAPSLHMVEVRKAKGDTLEFHKFYKNLSKTLKDVVWKSDDLQTQHAS

SEQ ID NO: 455 - DNA, 915 bp, Zea mays
  CDS (1)..(915)
atggctagagaaaaaaaaatccgccttctcctcccagtcgcaggccaggctcagcctcccctctcccctcctcggcatcttcgccgccggcgatctatctctctcacaatggcggtgcccatgtccgccatcgagtccgcgtggcagctcctgatcgccaacttcaccgagttccagctcgccaccgtcatcaccttcctgctccacgagaccgtcttctttctctctggccttccctccctcctcttcgagcgcttcggactcttcgccaaatacaagatccagaagaggagcaacacctctgcttaccaaaacagatgtgtcttgcgtcttattctctaccatgtctctgtgaacctgcctgtcatgattttgtcgtaccctgccttcaaattcatgggtcttaggagctctcttcctttgccacattggtcggttgttgtatctcaagttcttttctactttgtccttgaggattttatattctattgggggcacagggcattgcatacgaaatggctatacaaacacgttcacagcgtccaccacgagtacgccacaccctttggtttaacatcggaatatgcccacccagctgaaattttgttcctgggattcgccacagttgttggtcctgctcttactggccctcatctcttcaccctgtggctgtggatggtgttgagggttttggagacagttgaagctcacagcggctatcacttcccatggagcccatcaaatttcctgccgctgtatggcggctcggacttccatgactaccatcaccgtgtgctgtacacaaagtcagggaactatgcctcaacatttgtttacatggactggttgttcggcacggacaaggattatcgcaaggcaaagaccattgaggagaaagaagggaaaaatctgtga

SEQ ID NO: 456 - protein, 304 aa, Zea mays
MAREKKIRLLLPVAGQAQPPLSPPRHLRRRRSISLTMAVPMSAIESAWQLLIANFTEFQLATVITFLLHETVFFLSGLPSLLFERFGLFAKYKIQKRSNTSAYQNRCVLRLILYHVSVNLPVMILSYPAFKFMGLRSSLPLPHWSVVVSQVLFYFVLEDFIFYWGHRALHTKWLYKHVHSVHHEYATPFGLTSEYAHPAEILFLGFATVVGPALTGPHLFTLWLWMVLRVLETVEAHSGYHFPWSPSNFLPLYGGSDFHDYHHRVLYTKSGNYASTFVYMDWLFGTDKDYRKAKTIEEKEGKNL

SEQ ID NO: 457 - DNA, 915 bp, Zea mays
  CDS (1)..(915)
atgacgaggggccaggctcagcctcccccctcccctcctcggcatcttcgccgccggcgatctatctctctcacaatggcggcgcccatgtcagccatcgactcagcgtggcagctcctgatcgccaacttcaccgagttccagctcgccaccgtcgtcaccttcctgctccacgagaccgtcttcttcctctccggcctcccctccctcctcttcgagcgcttcggactcttcgccaagtacaagatccagaagaagagcaacacctctgcttaccaaaacagatgtgtcttgcgcctcattctctaccatgtatgtgtgaacctgcctgtcatgattttctcgtatcctgccttcaaattcatgggtctcaggagctctcttcctttgccacattggtcggttgttgtatctcaagttcttttctactttgtccttgaggattttatattctattgggggcacagggcattgcatacgaaatggctatacaaacacgttcacagcgtccaccacgagtacgccacaccctttggtttaacatcggaatatgcccacccagctgaaattttgttcctgggattcgccacagttgttggtcctgctcttactggccctcatctcttcaccctgtggctgtggatggtgttgagggttttggagacagttgaagctcacagcggctatcacttcccatggagcccatcaaatttcctgccgctgtatggcggctcggacttccatgactaccatcaccgtgtgctgtacacaaagtcagggaactatgcctcaacatttgtttacatggactggttgttcggcacggacaaggattatcgcaaggcaaagaccattgaggagaaagaagggaaaatctgtagattgtggaagctgctcagcaagactggcgattga

SEQ ID NO: 458 - protein, 304 aa, Zea mays
MTRGQAQPPPSPPRHLRRRRSISLTMAAPMSAIDSAWQLLIANFTEFQLATVVTFLLHETVFFLSGLPSLLFERFGLFAKYKIQKKSNTSAYQNRCVLRLILYHVCVNLPVMIFSYPAFKFMGLRSSLPLPHWSVVVSQVLFYFVLEDFIFYWGHRALHTKWLYKHVHSVHHEYATPFGLTSEYAHPAEILFLGFATVVGPALTGPHLFTLWLWMVLRVLETVEAHSGYHFPWSPSNFLPLYGGSDFHDYHHRVLYTKSGNYASTFVYMDWLFGTDKDYRKAKTIEEKEGKICRLWKLLSKTGD

SEQ ID NO: 459 - DNA, 804 bp, Zea mays
  CDS (1)..(804)
  misc_feature (754)..(754): n at position 754 is a or g or c or t/u
atggatccgccagagcagctcccccgccgttttcctcaccaacgggtacggcggcatgctccgtgcggccatgggcatggccggcggcttcaggaacggcgtcagcgacgcgcggctcaaggggcagctgagcttcccgtcccggcaggggtcggtgatgtcgcagatctcggaggtgggcagcgaggagctcgacggcggaggcggcggcagccccgaggcggccggcagcaacgccagcggcgcgccgcgcggctacgtcggcatcccggggtacccgatgggcggcggcacgtccggcgcctggtcggacgagccgtcgccgtcgccgacgtccggcgcgaagcgccgcccccgcgactccggtccctctccgcagaacgtgcagcagcaaccgctggcgccgcagctcagcctgcccagcggcggcaagccggcctcggcggagatggcggcgatcgagaagttcctgcagttccaggacgccgtcccctgcaagatccgcgccaagcgcgggtgcgccacccacccgcgcagcatcgccgagcgggtgaggaggacgaagatcagcgagcggatacggaagctgcaggagctcgtgcccaacatggaaaagcaaaccaacactgccgacatgctggatctggctgtggactacatcaaggatcttcagaagcaggtcaaggtgctgaacgacggccgcgccaactgcacctgctccggcggcggcaagctgcaggacccgttcaccagnttagaaggagcagcagccggcgcgcgcgtagcagtgcgcggccatgctga

SEQ ID NO: 460 - protein, 267 aa, Zea mays
  misc_feature (252)..(252): Xaa can be Ile or Leu or Val or Phe
MDPPEQLPRRFPHQRVRRHAPCGHGHGRRLQERRQRRAAQGAAELPVPAGVGDVADLGGGQRGARRRRRRQPRGGRQQRQRRAARLRRHPGVPDGRRHVRRLVGRAVAVADVRREAPPPRLRSLSAERAAATAGAAAQPAQRRQAGLGGDGGDREVPAVPGRRPLQDPRQARVRHPPAQHRRAGEEDEDQRADTEAAGARAQHGKANQHCRHAGSGCGLHQGSSEAGQGAERRPRQLHLLRRRQAAGPVHQXRRSSSRRARSSARPC

SEQ ID NO: 461 - DNA, 450 bp, Zea mays; identical to SEQ ID NO: 179
  CDS (1)..(450)
  misc_feature (402)..(447): n at positions 402 and 447 is a or g or c or t/u

SEQ ID NO: 462 - protein, 149 aa, Zea mays; identical to SEQ ID NO: 180
  misc_feature (134)..(134): Xaa can be Asp or Glu

SEQ ID NO: 463 - DNA, 795 bp, Zea mays
  CDS (1)..(795)
atggcgagcgagagaggtacggcggccgatctggcggcgcaggcggagggctcggccggggccggcaagtcggcgccgaacatggggaggggccgggtcgagctcaagcggatcgagaacaagatcaaccgccaggtcaccttcgccaagcgccgcaacggcctgctcaagaaggcgtacgagctctcggtgctctgcgacgccgaggtcgcgctcatcatcttctccaaccgcggcaagctctacgagttctccagcacgcagagcatgccaaaaacacttgaaaagtaccaaaaatgcagttttgcagggcctgaaacagcactccagaatagagagaatgagcaactgaaaagtagccgcaatgagtacctcaaactgaaggcacgtgttgataatttacagcggactcaaaggaacttgcttggtgaagatcttgagtcattaggcataaaagagctggagcacctggagaagcagctcgattcgtccttgaagcacataagatctacaaggacacaacacatggttgatcaactgacagaacttcagaaaaaagaacaaatgttttgtgaagcaaataagtgtcttcgaagaagactggaggagagcaaccaggttatatggcagcatgcgtgggagcaaagcgagcggcattctgaagtgcagccgcagcagctcaatggcaataacttcttccatcccctcgatggtgctggtgaacccacccttcagatagggtatccttcagaggcactgactagctcatgcatgaccaccttcctgcccccgtga

SEQ ID NO: 464 - protein, 264 aa, Zea mays
MASERGTAADLAAQAEGSAGAGKSAPNMGRGRVELKRIENKINRQVTFAKRRNGLLKKAYELSVLCDAEVALIIFSNRGKLYEFSSTQSMPKTLEKYQKCSFAGPETALQNRENEQLKSSRNEYLKLKARVDNLQRTQRNLLGEDLESLGIKELEHLEKQLDSSLKHIRSTRTQHMVDQLTELQKKEQMFCEANKCLRRRLEESNQVIWQHAWEQSERHSEVQPQQLNGNNFFHPLDGAGEPTLQIGYPSEALTSSCMTTFLPP

SEQ ID NO: 465 - DNA, 651 bp, Zea mays
  CDS (1)..(651)
  misc_feature (53)..(53): n at position 53 is a or g or c or t/u
atggcgagggagaggcgggagataaagaggatagagagcgcggcagcgaggcnggtcacgttctccaagcgccgccgcggcctcttcaagaaggcccaggagctctccgtgctgtgcgatgccgacgtcgcgctcatcgtcttctcctccacggggaagctctcccagttcgccagctccagtatgaatgagataattgacaagtacaacacgcattctaaaaacctggggaaaacagaacagccttcgctggacttgaacttagagcatagcaaatatgcaaatttgaatgagcaacttgcggaagcaagccttcgactcaggcagatgagaggtgaagaacttgagggattgaatgttgaagaactccagcagttggagaagaacctggaatctggtctgcatagggtgcttcaaacaaaggatcaacaattcttggaacagatcaatgacctcgaacgtaagagtacgcagctggcagaggagaacatgcaactgaggaatcaagtatcccagatacccccagctggcaagcaagcagttgctgatactgaaaatgttattgctgaagaagggcaatcctctgaatcagtgatgactgcgttgcactctgggagttcacaggataatgatgatggttcggatgtatga

SEQ ID NO: 466 - protein, 216 aa, Zea mays
  misc_feature (18)..(18): Xaa can be Arg or Gln or Leu or Pro
MARERREIKRIESAAARXVTFSKRRRGLFKKAQELSVLCDADVALIVFSSTGKLSQFASSSMNEIIDKYNTHSKNLGKTEQPSLDLNLEHSKYANLNEQLAEASLRLRQMRGEELEGLNVEELQQLEKNLESGLHRVLQTKDQQFLEQINDLERKSTQLAEENMQLRNQVSQIPPAGKQAVADTENVIAEEGQSSESVMTALHSGSSQDNDDGSDV

SEQ ID NO: 467 - DNA, 903 bp, Zea mays
  CDS (1)..(903)
atgtcgccacggcgccacctgcccactgcactgcccccagagcctccaagctgcatatcggaagtgaagcgcctcgcagtcctcctctcggatctcgcggtggaagtcgccggtccactcgatcagcgagcgagtcggtgccgcgcggcggattccccgacccgagcaaaggaaccggacatgcggccgcggctggtgctcttcggcgactccataaccgagctgtccttcgcgtccggcggatggggggccgcgctcaccgaccgcttcgcccgccaggctgacgtggtgctgcgcgggctcagcggctacaacacgcggtgggcgctcaaggtgctgccgcgggccatggagggcgcggcgggcgcgggcgcggacccggcggccgtgacagtcttcttcggcgccaacgacgcctctctgcccgaccaggtgcaggcgcaccagcacgtgccgctcaaggagtaccagagcaacctccgcgccatctgcgcctatttcaaggagcgatggccctccactgctgtcatactcatcactcccccaccgatttacgagccagcgagaatccgagacatgtatggagacgacgagccttcacgccaaccagaaaggagcaatgaggctgccggcgcttacgcacaggcatgcatagatgttgccacagaattgaaccatccagttatagacatctggaccaagatgcaggaatttccagactggcaaacatctgcattgagcgacgggctccacttcaccccagtaggaaacaagatcctgttcgaggaggtggtgaagacgctggagacgagcatcggtttcagccaggagcggctcccgtcggacctcccgctgttccacgagatcgaccccaaggaccccatgaaagccttcggagcttga

SEQ ID NO: 468 - protein, 300 aa, Zea mays
MSPRRHLPTALPPEPPSCISEVKRLAVLLSDLAVEVAGPLDQRASRCRAADSPTRAKEPDMRPRLVLFGDSITELSFASGGWGAALTDRFARQADVVLRGLSGYNTRWALKVLPRAMEGAAGAGADPAAVTVFFGANDASLPDQVQAHQHVPLKEYQSNLRAICAYFKERWPSTAVILITPPPIYEPARIRDMYGDDEPSRQPERSNEAAGAYAQACIDVATELNHPVIDIWTKMQEFPDWQTSALSDGLHFTPVGNKILFEEVVKTLETSIGFSQERLPSDLPLFHEIDPKDPMKAFGA

SEQ ID NO: 469 - DNA, 627 bp, Zea mays
  CDS (1)..(627)
atggcggcggagatggggcgggggccggtgcagctgcgccggatcgagaacaagatcaaccgccaggtgaccttctccaagcgccggaacgggctgctgaagaaggcccacgagatctccgtgctctgcgacgcagaggtcgcgctcatcgtcttctccactaaggggaagctctacgagtactctagccattccagcatggaaggcattcttgagcgttaccagcgttactcatttgaagaaagggcagtacttaacccaagtattgaagaccaggcaaattggggagatgaatatgtccggttaaaatccaaacttgatgcacttcagaagagtcaaaggcagctgttaggagaacaattgagttcactgaccataaaagaactccagcaactggagcaacaactggacagttctttgaagcatattaggtcaagaaagaatcagctcatgttcgattcaatttccgcgcttcagaaaaaggagaaagcacttacagatcaaaacggtgtcctgcaaaagttcatggagacagagaaggagaaaaacaaggctttgatgaacgcgcagctccgggagcagcaaaatggagcatcaacaagctccccatcactttcaccaccatga

SEQ ID NO: 470 - protein, 208 aa, Zea mays
MAAEMGRGPVQLRRIENKINRQVTFSKRRNGLLKKAHEISVLCDAEVALIVFSTKGKLYEYSSHSSMEGILERYQRYSFEERAVLNPSIEDQANWGDEYVRLKSKLDALQKSQRQLLGEQLSSLTIKELQQLEQQLDSSLKHIRSRKNQLMFDSISALQKKEKALTDQNGVLQKFMETEKEKNKALMNAQLREQQNGASTSSPSLSPP

SEQ ID NO: 471 - DNA, 726 bp, Zea mays
  CDS (1)..(726)
atgcgtgggcgtaggacgagagagaggatcggcggcggcgtgtgggagatggcgcgcgagaggcgggagatacggcggatagagagcgcggcggcgcggcaggtgaccttctccaagcgccggcgcgggctgttcaagaaggcggaggagctcgccgtgctgtgcgacgccgacgtcgcgctcgtcgtgttctccgccaccggcaggctctcgcagttcgcgagctccagtgtgaatgacatcgttgacaagtacagtacacattctaagaatctggggaaatcacatcagcagccttctattgatttgaatgtagagcagagcaaatacagcggcttgaacgagcaacttgctgaagaaactaatggacttagacagatgagaggtgaagaccttgagggattgagtgtagaggaattgcaccgaatggaaaggaaacttgaagcaggactgcatagagtgattagtacaaaggaccagctattcatgcaacaaatcggcgaattactgcaaaagggcacacagctagaagatgagaacaggcgtctaaaagaacaaatgcctcaggtgctaacggctggcacaatggtggttgctgctgctgcagaaaatatcctcactgaagacgggcagtcgtctgaatctgtaatgactgcattgcattcaggaagctcgctcgactgtgatgatggttccgatatatccttgaagttgtcgttgccttga

SEQ ID NO: 472 - protein, 241 aa, Zea mays
MRGRRTRERIGGGVWEMARERREIRRIESAAARQVTFSKRRRGLFKKAEELAVLCDADVALVVFSATGRLSQFASSSVNDIVDKYSTHSKNLGKSHQQPSIDLNVEQSKYSGLNEQLAEETNGLRQMRGEDLEGLSVEELHRMERKLEAGLHRVISTKDQLFMQQIGELLQKGTQLEDENRRLKEQMPQVLTAGTMVVAAAAENILTEDGQSSESVMTALHSGSSLDCDDGSDISLKLSLP

SEQ ID NO: 473 - DNA, 819 bp, Zea mays
  CDS (1)..(819)
atgttgcaggcagatccatatagtctgctggtggcgagacaaagcaacggatcgtcgtcgatccggagagcggaaagcgcgcagatcgcgacggccatggggcgcgggaaggtggtgctgcagcggatcgagaacaagatcagccgccaggtgaccttcgccaagcgccggaacggcctgctcaagaaggcgtacgagctctccatcctctgcgacgccgaggtcgcgctcgtcctcttctcccacgccggccgcctctaccagttctcatcctcctccaatctgcttaagactctagagcggtaccagaggcacatctatgcttcagctgatgctgcagttccatcttgcgatgagatgcagaataactatcaagaatatgtgaagctgaaagcacgagttgaggttttacaacactcacaaaggaatcttcttggtgaagaactggctccacttagcccaagtgaacttgaccagcttgagagtcaagtagacaagaccttgaagcaaataagatcaagaaagactcaggtgttacttgatgaactttgcgacttaaagagaaaggaacaaatgctgcaagacgctaacagggttctgaaaaggaagctgcacgagtttgaggcagaggctgcttctcccccgcaattggcgtggcaaggcgaaggcggcatgttgtcccatgaccctccacagccagaacacttcttcgtggctctggagagcaacccatgtctgcaacctacataccatactatggacatgaaccagcagccagagccagcgccgggcggctgctatcctgcatggatgtcttga

SEQ ID NO: 474 - protein, 272 aa, Zea mays
MLQADPYSLLVARQSNGSSSIRRAESAQIATAMGRGKVVLQRIENKISRQVTFAKRRNGLLKKAYELSILCDAEVALVLFSHAGRLYQFSSSSNLLKTLERYQRHIYASADAAVPSCDEMQNNYQEYVKLKARVEVLQHSQRNLLGEELAPLSPSELDQLESQVDKTLKQIRSRKTQVLLDELCDLKRKEQMLQDANRVLKRKLHEFEAEAASPPQLAWQGEGGMLSHDPPQPEHFFVALESNPCLQPTYHTMDMNQQPEPAPGGCYPAWMS

SEQ ID NO: 475 - DNA, 627 bp, Zea mays
  CDS (1)..(627)
atggcgcggggcaaggtgcagctgcggcgcatcgagaacccggtgcaccggcaggtgaccttctgcaagcgccgcgccgggctgctcaagaaggcccgggagctctccgtcctctgcgacgcccacgtcggcatcatcgtcttctccgcgcacggcaagctctacgacctcgccaccaccgggaccatggaagagctgatcgagaggtacaggactgccagcagcagagaagcagccgacggctgcggcgacaataacagaatggacccaaagcaagaaaccatggtgctgcaacaggaaatcaacctgcttcagaaaggcctgaggtacatctatgggaacagaacaaatgaacacatgagtgttgaagaactgaatgctctagagaggtacttggagatatggatgtacaacatccgctctgcaaagatgcagataatgattcaagagatacaagcactgaaaagcaaggaaggcatgctgcaagctgctaacgaagttcttcaggagaagatagtagaacagagtagtttgcttgacgtaggcatggttgtagcggatcaacagaacgggcattttagtacagtcccactggtagaagagatgatcagtaacccgctgacttga

SEQ ID NO: 476 - protein, 208 aa, Zea mays
MARGKVQLRRIENPVHRQVTFCKRRAGLLKKARELSVLCDAHVGIIVFSAHGKLYDLATTGTMEELIERYRTASSREAADGCGDNNRMDPKQETMVLQQEINLLQKGLRYIYGNRTNEHMSVEELNALERYLEIWMYNIRSAKMQIMIQEIQALKSKEGMLQAANEVLQEKIVEQSSLLDVGMVVADQQNGHFSTVPLVEEMISNPLT

SEQ ID NO: 477 - DNA, 1701 bp, Zea mays
  CDS (1)..(1701)
atggcaaaaatggcaaaggctctcctaggtggcctatcggcgatcctcgtcgtggcggtggtcgtcggtgtggtcgccaccgtcacccgctccggcaagaaggccggcgacaacttcacggtcccgggggaggcttcccttgccaacgtccggcaagtcggtcaagtccctgtgcgcgcccaccctgtacaaggagtcgtgcgagaagacgttgtcccaggccaccaatggcaccgagaaccccaaggaggtgttccacagcgtggccaaggtggcgctggagtcggtccagacggcggtcgagcagtccaagtcgatcggcgaggccaaggcagcgactccatgaccgagagcgcgcgcgaggactgcaagaagctcctggaggacgctgccgacgacctgaggggcatgctcgagatggccggcggtgacatcaaggtgctgttcagtcggtccgacgacctcgagacctggctcacgggcgtcatgacgttcatggacacctgcgtcgacggcttcgtcgacgagaagctcaaggccgacatgcactccgtcgtgcgcaacgccaccgagctcagcagcaacgcgctggccatcaccaacagcctcggcgggatcctgaagaagatggacctcggcatgttcagcaaggactcgcgccgccgactgctgtcgtcggagcaggatgagaagggctggcccgtgtggatgcggtcgccggagaggaagctgctggcatcgggcaaccagcccaagccgaacgcgatcgtggccaaggacggcagcgggcagttcaagagcatccagcaggccgtggacgccgtgcccaaaggccatcaggggaggtacgtcatctacgtgaaggccggcctctacgacgagatcgtcatggtccccaaggacaaggtcaacatcttcatgtacggcgacgggcctaagcaaagccgcgtgaccggccgcaagagcttcgccgacggcatcaccaccatgaagaccgccaccttctccgtcgaggcgtccgggttcatctgcaagaacatggggttccacaacacggccggcgcggagcggcaccaggcggtggcgctccgggtgcagggggacctcgcggcgttctacaactgccggttcgacgcgttccaggacacgctgtacgtgcagccgcggcggcagttcttccgcaactgcgtggtctccggcaccatcgacttcatcttcggcaactcggcggcggtgttccagaactgcctcatcatcacgcggcggcccatggacaaccagcagaactcggtgacggcgcacgggccgaccgaccccaacatgaagtccgggctcgtcatccagaactgccgcctggtgcccgaccagaagctgttcccggaccgcttcaagatcccctcgtacctgggccgcccctggaaggagttctcgcgcctcgtcatcatggagagcaccatcgccgacttcgtcaagccagaggggtacatgccctggaacggcgacttcgccctcaagacgctctactacgccgagtacaacaaccgcgggcccggcgccggcaccagcaagagggtcaactggcccggcttccacgtcatcggacggaaggaggccgagccgttcaccgccgggccgttcatcgacggcgccatgtggctcaagtacaccggcgcgccgcacatacttggtttcaagttctga

SEQ ID NO: 478 - protein, 566 aa, Zea mays
MAKMAKALLGGLSAILVVAVVVGVVATVTRSGKKAGDNFTVPGEASLANVRQVGQVPVRAHPVQGVVREDVVPGHQWHREPQGGVPQRGQGGAGVGPDGGRAVQVDRRGQGSDSMTESAREDCKKLLEDAADDLRGMLEMAGGDIKVLFSRSDDLETWLTGVMTFMDTCVDGFVDEKLKADMHSVVRNATELSSNALAITNSLGGILKKMDLGMFSKDSRRRLLSSEQDEKGWPVWMRSPERKLLASGNQPKPNAIVAKDGSGQFKSIQQAVDAVPKGHQGRYVIYVKAGLYDEIVMVPKDKVNIFMYGDGPKQSRVTGRKSFADGITTMKTATFSVEASGFICKNMGFHNTAGAERHQAVALRVQGDLAAFYNCRFDAFQDTLYVQPRRQFFRNCVVSGTIDFIFGNSAAVFQNCLIITRRPMDNQQNSVTAHGPTDPNMKSGLVIQNCRLVPDQKLFPDRFKIPSYLGRPWKEFSRLVIMESTIADFVKPEGYMPWNGDFALKTLYYAEYNNRGPGAGTSKRVNWPGFHVIGRKEAEPFTAGPFIDGAMWLKYTGAPHILGFKF

SEQ ID NO: 479 - DNA, 1635 bp, Zea mays
  CDS (1)..(1635)
atggcacgaggggcggctacaccacgcccacgcggcgccggagccgatcccccgatggatctcccgccgctctcccaccaggccctcttcgccgccgtccgatccgccgacgcgcccgccgtccgcgcggtcctggccgacgccgaggcgtcggccacctccttggccgcgctcgccgccgctcagacgggcgccggggaaaccgcgctgtacgttgccgcggaggccggcagcgaggaggtcgtgcgcctcctcctccctctctacgacttcgaggcagccaccgtccgctcacgccttgacctcgacgccttccatgtcgccgccaagcagggccacaccggggttgtgaaagagttcttggggcggtggccagggctttgctcagtctgtgactcttccaacactagtcccctctactcggctgctgtcaaggatcacttggatgtggtaaatgctatactggacactgatgatagctgcataaagattgtgcggaagaatgggaaaacatccctacatactgctgcaagaattggataccatcgtattgtcaaagcactcatagagagagatccaggaatcgttccgatcaatgataggaagggacaaactgcacttcacatggctgtgaagggcaaaaatacagatgtagtggaagagttattgatggctgatgtttccattctcaatgtgagggacaagaaaggaaatactgctttgcacatagctacacggaaatggaggccccagatggtacagcttcttcttagctacgaatcacttgaaattaatgctatcaatattcaaaatgaaacagctatggatttggctgacaaagttccttatggtgagtctaaaacggaaataatagagtggttgacagaggctggtgcaaagaatgccagaaatgtggggaaaattgatgaggcatcagaactgaggagaactgtgagtgatatcaagcacaatgttcaggcacagcttagcgagaacgctaagaccaataaacgagtgactgggattcgcaaagaattgcagaaactgcatagagaagctattcagaacaccatcaattcagtcaccatggtagcaaccctgattgcctccattgccttcgttgccatattcaatttgccaggtcaatacttccaagatgtgaatagtgggggagacattggtgaggctcaaatagccaggcttactggtttccgtgtcttctgccttctgaatgcaactgctctcttcatttccctcgcggtggtcgtcgtgcagatcaccttggttgcctgggaaactggtgcccagaagcaagttatcaagatcgtaaataagctcatgtggaccgcatgccttagcacaggtgcggcttttatctcactggcctatgttgtagttggcccgcagcatgcctggatggccttcacagtatcagccatcggagggccgatcatgattggaaccctcctgttcctagcctatctgttgttgcgcccacggttcaagtttggcgaagacagacagcgccgcatcaagagggcaagcggcagcaagtccttctcctggtcactccatgatggtttttcagatccggaagccttctctgatcatgagaagaggatctatgccctgtga

SEQ ID NO: 480 - protein, 544 aa, Zea mays
MARGAATPRPRGAGADPPMDLPPLSHQALFAAVRSADAPAVRAVLADAEASATSLAALAAAQTGAGETALYVAAEAGSEEVVRLLLPLYDFEAATVRSRLDLDAFHVAAKQGHTGVVKEFLGRWPGLCSVCDSSNTSPLYSAAVKDHLDVVNAILDTDDSCIKIVRKNGKTSLHTAARIGYHRIVKALIERDPGIVPINDRKGQTALHMAVKGKNTDVVEELLMADVSILNVRDKKGNTALHIATRKWRPQMVQLLLSYESLEINAINIQNETAMDLADKVPYGESKTEIIEWLTEAGAKNARNVGKIDEASELRRTVSDIKHNVQAQLSENAKTNKRVTGIRKELQKLHREAIQNTINSVTMVATLIASIAFVAIFNLPGQYFQDVNSGGDIGEAQIARLTGFRVFCLLNATALFISLAVVVVQITLVAWETGAQKQVIKIVNKLMWTACLSTGAAFISLAYVVVGPQHAWMAFTVSAIGGPIMIGTLLFLAYLLLRPRFKFGEDRQRRIKRASGSKSFSWSLHDGFSDPEAFSDHEKRIYAL

SEQ ID NO: 481 - DNA, 744 bp, Zea mays
  CDS (1)..(744)
atggctcgcgcccacttccgctgccgtgctcaagacccgttcctcggggccaggcgcgcgctcgccaatgccgccgccaagcccggccctcgccgcgcgctggtcgtcgccgccgcggccgccgccaagaagtcgtggatcccggccatcaagagcgacgccgagatcgtgaacccgccctggctcgacggctcgctccccggcgacttcgggttcgacccgctggggctgggcaaggacccggcgttcctcaagtggtaccgggaggcggagctgatccacgggcggtgggcgatggcggccgtgctgggcatcttcgtggggcaggcgtggagcggcatcccgtggttcgaggccggcgcggacccgagcgccatcgcgcccttctccttcgggtcgctgctgggcacgcagctgctgctgatggggtgggtggagtcgaagcggtgggtggacttcttcaacccggactcccaggccgtggagtgggccacgccatggtcccgcaccgccgagaacttcgctaacttcaccggcgagcagggctacccgggcggcaagttcttcgacccgctcggcctcgccggcaccgtcaaggacggcgtctacatccccgacgtcgacaagctcgagcggctcaagctggccgagatcaagcacgcccgcatcgccatgcttgccatgctcgccttctacttcgaggctgggcagggcaagacgccgctcggcgcgctcggcctatga

SEQ ID NO: 482 - protein, 247 aa, Zea mays
MARAHFRCRAQDPFLGARRALANAAAKPGPRRALVVAAAAAAKKSWIPAIKSDAEIVNPPWLDGSLPGDFGFDPLGLGKDPAFLKWYREAELIHGRWAMAAVLGIFVGQAWSGIPWFEAGADPSAIAPFSFGSLLGTQLLLMGWVESKRWVDFFNPDSQAVEWATPWSRTAENFANFTGEQGYPGGKFFDPLGLAGTVKDGVYIPDVDKLERLKLAEIKHARIAMLAMLAFYFEAGQGKTPLGALGL

SEQ ID NO: 483 - DNA, 807 bp, Zea mays
  CDS (1)..(807)
atgacgacgcccggctcctgtcctgcgacaaccgccgccacccaccctcccatgtgcgccgctagcgccgcaggtggatcgcaaaaaatggtgcgtccgcgactagtgctcttcggggactccatcaccgagcagtccttccgccccggtggctggggtgccgcactggctgatacctactcgcgcaaggctgatgtagttgtcagaggctatggtggatacaacacaagatgggctcttttcttagtacatcacatctttccgctggatggtttagcaccccctcttgcaaccactattttctttggagcaaatgacgcagccctgttaggaagaactggcgagcgacaacatgttccagtttcagaatataaaaataatctcaaaatgattgttaatcatttgaaggattgttctaattccatggttattgtgcttattacgccacctccaattgatgaagaaggaagagaaagatttgcacggtcactttatggacagaatgcgaggaagctacctgaaaggacaaatgaaatggctggggtctatgctggttattgcgtcgaactagctagagaaatgtgtataccctgtgttaatatctggtcaaagatgcaggagacagaaggatggcagaaactttacctaagtgacggtctgcatctgacacaggaaggaaacgcagttgtccacaaggaggttgtcgaagcattgagaaatgctggtttcaaagctgaacagatgccgtacgactttcctcatcactccaaaatagatggcagttgtccagaaaaggccttccaatga

SEQ ID NO: 484 - protein, 268 aa, Zea mays
MTTPGSCPATTAATHPPMCAASAAGGSQKMVRPRLVLFGDSITEQSFRPGGWGAALADTYSRKADVVVRGYGGYNTRWALFLVHHIFPLDGLAPPLATTIFFGANDAALLGRTGERQHVPVSEYKNNLKMIVNHLKDCSNSMVIVLITPPPIDEEGRERFARSLYGQNARKLPERTNEMAGVYAGYCVELAREMCIPCVNIWSKMQETEGWQKLYLSDGLHLTQEGNAVVHKEVVEALRNAGFKAEQMPYDFPHHSKIDGSCPEKAFQ

SEQ ID NO: 485 - DNA, 855 bp, Zea mays
  CDS (1)..(855)
  misc_feature (4)..(798): n at positions 4, 5 and 798 is a or g or c or t/u
atgnngcaagaacctgctagagaggaacaagctggtatcgtcgccagcatgggtagaggaaggattgagatcaagaggatcgagaacaacacgagccggcaggtcaccttctgcaagcgccgcaatgggctcctcaagaaggcgtacgagctctccgtcctctgcgacgctgaggtggccctcatcgtcttctctagccgtggtcgcctctacgagtatgccaacaacagtgtcaaggctactgttgagaggtacaagaaggcacacaccgttggctcttcctctgggcccccgctcctagagcacaatgcccagcaattctaccagcaagaatcagcaaaactgcgcaaccagatccagatgctgcaaaacactaacaggcacttggttggtgactccgtgggaaacctgtcactcaaggagctgaagcagctggagagccgccttgagaaaggcatctctaagatcagggccaggaagagtgagctgctggctgcggagatcagttacatggccaaaagggagactgagcttcagaatgaccacatgaccctcaggaccaagattgaggagggagagcaacagctgcagcaggtgaccgtggcacggtcagttgcagcagcagcagctgccaccaacttggagctgaacccattcttggagatggataccaaatgcttcttcactggcggccccttcgcgacgctggacatgaagtgctttctccccggcagcttgcagcagatgctggaggcacagcagcgccagatgctcgccaccgagctgaacctcggctancaactggcgccgcctggttctgacgctgccaacaataaccctcatcatcagttctga

SEQ ID NO: 486 - protein, 284 aa, Zea mays
  misc_feature (2)..(2): Xaa can be any amino acid
  misc_feature (266)..(266): Xaa can be any amino acid
MXQEPAREEQAGIVASMGRGRIEIKRIENNTSRQVTFCKRRNGLLKKAYELSVLCDAEVALIVFSSRGRLYEYANNSVKATVERYKKAHTVGSSSGPPLLEHNAQQFYQQESAKLRNQIQMLQNTNRHLVGDSVGNLSLKELKQLESRLEKGISKIRARKSELLAAEISYMAKRETELQNDHMTLRTKIEEGEQQLQQVTVARSVAAAAAATNLELNPFLEMDTKCFFTGGPFATLDMKCFLPGSLQQMLEAQQRQMLATELNLGXQLAPPGSDAANNNPHHQF

SEQ ID NO: 487 - DNA, 921 bp, Zea mays
  CDS (1)..(921)
atgagatcatatcgtacatctgcgtcgtctcctactcgatctatagctccttcgtcccccatcttcagaaattggaatttcttgcagtcgcttcgctggttctgctctctagcttttaactcgttcctgctctttcttcagaccgatctgagttgcgggccgtcgtccaaggcgaaaggaggacagccggcagcgacgagctccggcggcgacaggcaggggaggggcaagatcgagatcaagcgcatcgagaacacgacgaaccggcaagtcaccttctgcaagcgccgcaacggcctgctcaagaaggcgtacgagctctcggtgctctgcgacgccgaggtcgcgctcgtcgtcttctccagccgcggccgcctctacgagtacgccaacaacagcgtgaagggcaccattgagaggtacaagaaggcaaccagtgacaactccagcgcagctggtacgattgcagaggtcaccattcagcattacaagcaggaatctgctaggctgaggcagcagatcgttaacttgcagaactccaacagggccctgataggtgattctatcacaaccatgagccacaaggaacttaagcacttggagactaggttagacaaagctctcggaaagattagagcaaaaaagaacgatgtgctgtgttttgaagtcgagtacatgcagagaagggaaatggagttgcagaatgacaacttgtacttaaggagccgggttgatgagaatgaaagggcacaacagacagcgaacatgatgggggcaccatcgacaagtgagtatcagcagcacggttttactccttatgatccaataaggagcttcctgcagttcaacatcgtgcagcagcctcagtcctattctcagcaggaggaccggaaagacttcaacgaccaaggtggaagatga

SEQ ID NO: 488 - protein, 306 aa, Zea mays
MRSYRTSASSPTRSIAPSSPIFRNWNFLQSLRWFCSLAFNSFLLFLQTDLSCGPSSKAKGGQPAATSSGGDRQGRGKIEIKRIENTTNRQVTFCKRRNGLLKKAYELSVLCDAEVALVVFSSRGRLYEYANNSVKGTIERYKKATSDNSSAAGTIAEVTIQHYKQESARLRQQIVNLQNSNRALIGDSITTMSHKELKHLETRLDKALGKIRAKKNDVLCFEVEYMQRREMELQNDNLYLRSRVDENERAQQTANMMGAPSTSEYQQHGFTPYDPIRSFLQFNIVQQPQSYSQQEDRKDFNDQGGR

SEQ ID NO: 489 - DNA, 1266 bp, Zea mays
  CDS (1)..(1266)
atgagcaccccctgcacctgcagactgcaaccgcaatgtcggctctcgggacgctctccggcggcgctgccggtgtctccggcctcctccgcctccgccgccgggccgccccagcccccgcgatcgcggcgccgtcgcacctccccgctgggaccgtcaagtgcgcggccgccgtgcccgatgccgccccgatcgtctggggccgtcagctccgcccggcgctcctcctacccgcggcgctgctcccttcgttgcagcccgccagggaggcacacgctgcagccgcccgccgcagccgccgagtccgcaggggaggccaagtctgtgggtttcctggagaagtacccggccctggtcaccggcttcttcttcttcatgtggtacttcctcaacgtcatattcaacatcctcaacaagaagatctacaactacttcccatacccatactttgtgtccttgatccatctagtagtgggtgtcgtatactgcctcatcagctggagtgtcggtctccccaagcgagcgcctatcaatggcacgctcctcaagcttctctttccagtcgccctgtgccatggtattggtcacatcactagcaatgtgtccttcgctgctgttgcagtctcatttgctcacactatcaaagctctggagcccttcttcagcgcagcggctactcagtttatccttggacagcaagttcccttctctctgtggctttctcttgcccctgtggtcattggtgtttcaatggcatcccttactgagctttcattcaactggactggcttcatcaatgccatgatatcaaacatctcattcacttacaggagcatttattccaagaaagctatgactgacatggatagcaccaacgtgtatgcttacatctcaataatcgctctaattgtttgcattccacctgcattgatctttgaagggcccaagctaatgcagcatggatttagtgatgccattgcaaaagtaggtttgacaaagtttgtcagtgacctattcttggttggactgttctaccatctgtataaccagattgctacaaacaccttggagcgagtggctcctctgacacatgctgtcggcaatgtgttgaaacgtgtttttgtcatcggtttctcaatcattgtttttggtaacaaaattagcacacaaactggaattggcacgtccattgccatagctggtgttgctatgtactcttacattaaggctaagattgaagaggagaaaaggaaaaagagcgcatga

SEQ ID NO: 490 - protein, 421 aa, Zea mays
MSTPCTCRLQPQCRLSGRSPAALPVSPASSASAAGPPQPPRSRRRRTSPLGPSSARPPCPMPPRSSGAVSSARRSSYPRRCSLRCSPPGRHTLQPPAAAAESAGEAKSVGFLEKYPALVTGFFFFMWYFLNVIFNILNKKIYNYFPYPYFVSLIHLVVGVVYCLISWSVGLPKRAPINGTLLKLLFPVALCHGIGHITSNVSFAAVAVSFAHTIKALEPFFSAAATQFILGQQVPFSLWLSLAPVVIGVSMASLTELSFNWTGFINAMISNISFTYRSIYSKKAMTDMDSTNVYAYISIIALIVCIPPALIFEGPKLMQHGFSDAIAKVGLTKFVSDLFLVGLFYHLYNQIATNTLERVAPLTHAVGNVLKRVFVIGFSIIVFGNKISTQTGIGTSIAIAGVAMYSYIKAKIEEEKRKKSA

SEQ ID NO: 491 - DNA, 828 bp, Zea mays
  CDS (1)..(828)
atgtgtgcgcgcgcaatggcactcgtgtccgcctcctcgtcctccaccaccgccgtcgcggcgctccccaggaatgggcagcagcgggcgtcgtcgtcgttgttctcctcctcctcctcttcctccttcctcggcggcaagacgctgctgagacaggccgaggcggcccggccgtcgttcgccgtgcgcgccgcggcggattccgacaggccgatctggttccccggcagcacccctccgccgtggctcgacggcagccttcccggcgacttcggctttgatccctggggcctcggatctgacccggagagcctgcggtggaacgtgcaggcggagctggtgcactgccggtgggcgatgctcggcgcggcgggcatcttcatcccggagttcctgaccaagatcggcgtcctcaacacacccttctggtacaccgccggcgagcagcagtacttcaccgacaccaccaccctcttcatcatcgagctcatcctcatcggctgggccgagggccgccgctgggctgacatcatcaagcccggaagcgtcaacaccgaccccatcttccccagcaacaagctcaccggcaccgacgtcgggtaccctggtggcctctggtttgacccgctcggctggggcagcggctcgccggagaagatcaaggagctgcgcaccaaggagatcaagaacggacgcctcgccatgctcgccgtcatgggcgcctggttccaggccgagtacaccggcaccggccccatcgacaacctcttcgcccacctcgccgaccctggccacgccaccatcttccaggccttcacccccaaatga

SEQ ID NO: 492 - protein, 275 aa, Zea mays
MCARAMALVSASSSSTTAVAALPRNGQQRASSSLFSSSSSSSFLGGKTLLRQAEAARPSFAVRAAADSDRPIWFPGSTPPPWLDGSLPGDFGFDPWGLGSDPESLRWNVQAELVHCRWAMLGAAGIFIPEFLTKIGVLNTPFWYTAGEQQYFTDTTTLFIIELILIGWAEGRRWADIIKPGSVNTDPIFPSNKLTGTDVGYPGGLWFDPLGWGSGSPEKIKELRTKEIKNGRLAMLAVMGAWFQAEYTGTGPIDNLFAHLADPGHATIFQAFTPK

SEQ ID NO: 493 - DNA, 834 bp, Zea mays
  CDS (1)..(834)
atgctcccctgcccctcgcagcggctactctacaggtctagcgactctttcgccatccatagagggaggaggcgcggcggagatggtgggcggtggcggcggcgggccgtgcggcgggtgggcaagtacgaggtgggacgcaccatcgaggaaggcaccttcgccaaggtcaagttcgcgcagaacaccgagaccggggaaagcgtcgccatgaaggtgctcgaccgctcctccatcctcaagaacaagatggccgaacagattaagagagaaatatccataatgaagcttgtcaggcatcccaatgtcgttaggctacacgaggttttggcaagccggaagaagatatttataattctggagttcatcactggcggcgagctattcgataaaattattcgtcatgggagactcagtgaagcagatgcacgcagatactttcagcagcttattgatggtgttgatttttgtcacaagaaaggagtctaccatcgagacttaaagcctgaaaatctcctccttgattcccaaggcaatcttaaaatttcagactttggactgagtgcatggcctgctcagggatctttccttctacgtacaacctgtgggactccgaactatgttgccccagaggttctcagtcataagggatataatggcgcacttgctgatacatggtcatgtggagtaattttatatgtattgttagcaggttatcttccatttgatgaagtggacctgactaccctttatggaaagattgagagtgcagaatattcattcccagcctggttttcaggtggtgcgaaatcactgattcgtagaattctttga

SEQ ID NO: 494 - protein, 277 aa, Zea mays
MLPCPSQRLLYRSSDSFAIHRGRRRGGDGGRWRRRAVRRVGKYEVGRTIEEGTFAKVKFAQNTETGESVAMKVLDRSSILKNKMAEQIKREISIMKLVRHPNVVRLHEVLASRKKIFIILEFITGGELFDKIIRHGRLSEADARRYFQQLIDGVDFCHKKGVYHRDLKPENLLLDSQGNLKISDFGLSAWPAQGSFLLRTTCGTPNYVAPEVLSHKGYNGALADTWSCGVILYVLLAGYLPFDEVDLTTLYGKIESAEYSFPAWFSGGAKSLIRRIL

SEQ ID NO: 495 - DNA, 720 bp, Zea mays
  CDS (1)..(720)
  misc_feature (47)..(47): n at position 47 is a or g or c or t/u
atgcgctccggctgcgctctgccttgctttcctgctacctgctctancgcgagcgagagaggtacggcggccgatctggcggcgcaggcggagggctcggccggggccggcaagtcggcgccgaacatggggaggggccgggtcgagctcaagcggatcgagaacaagatcaaccgccaggtcaccttcgccaagcgccgcaacggcctgctcaagaaggcgtacgagctctcggtgctctgcgacgccgaggtcgcgctcatcatcttctccaaccgcggcaagctctacgagttctccagcacgcagagcatgccaaaaacacttgaaaagtaccaaaaatgcagttttgcagggcctgaaacagcactccagaatagagagaatgagcaactgaaaagtagccgcaatgagtacctcaaactgaaggcacgtgttgataatttacagcggactcaaaggaacttgcttggtgaagatcttgagtcattaggcataaaagagctggagcacctggagaagcagctcgattcgtccttgaagcacataagatctacaaggacacaacacatggttgatcaactgacagaacttcagaaaaaagaacaaatgttttgtgaagcaaataagtgtcttcgaagaagactggaggagagcaaccaggttatatggcagcatgcgtgggagcaaagcgagcggcattctgaagtgcagccgtga

SEQ ID NO: 496 - protein, 239 aa, Zea mays
  misc_feature (16)..(16): Xaa can be Asn or Thr or Ser or Ile
MRSGCALPCFPATCSXASERGTAADLAAQAEGSAGAGKSAPNMGRGRVELKRIENKINRQVTFAKRRNGLLKKAYELSVLCDAEVALIIFSNRGKLYEFSSTQSMPKTLEKYQKCSFAGPETALQNRENEQLKSSRNEYLKLKARVDNLQRTQRNLLGEDLESLGIKELEHLEKQLDSSLKHIRSTRTQHMVDQLTELQKKEQMFCEANKCLRRRLEESNQVIWQHAWEQSERHSEVQP

SEQ ID NO: 497 - DNA, 1545 bp, Zea mays
  CDS (1)..(1545)
atggccgcggcggtgctgctcggggccgtggcgttgctgctcgcggacgccgctgcgaggagagcgcactggtggtacagggaggcggctgaggcggtgctggtcggcgccgtggctttggtggtggtggacgccgcggcgcggagggcgcacgggtggtacagggaagcggcgctgggcgcggagcggcgggcgcggctgccgccgggggagatggggtggcccttggtcggcggcatgtgggccttcctccgcgccttcaagtccggcaagcccgacgccttcatcgcctccttcgtccggcggttcggtcgcacgggcgtgtaccgaagcttcatgttcagcagcccgacggtgctggtgacgacggcggaggggtgcaagcaggtgctgatggacgacgacgcgttcgtgacggggtggcccaaggcgacggttgcgctggtcgggccgcggtcgttcgtggcgatgccgcacgacgagcaccggcgcatccgcaagctgacggccgcgcccatcaacggcttcgacgcgctgacggggtacctgcccttcatcgacagcaccgtcacgtcgtcgctgcgcgcgtgggcggaccacggcggcagcgtcgagttcctgacggagctgcggcgcatgacgttcaagatcatcgtgcagatcttcctgggcggcgcggaccaggccaccacgcgcgcgctggagcgcagctacacggagctcaactacggcatgcgcgccatggccatcaacctgcccggcttcgcgtaccgcggggcgctgcgcgcgcgccgccgcctcgtggccgtgctgcagggcgtgctggacgagcgccgcgccgccagggccaagggggtctcgggcggaggagtggacatgatggaccggctgatcgaggcccaggacgagcgcgggcggcgcctggacgacgacgagatcatcgacgtgctcgtcatgtacctcaacgccggccacgagtcgtccggccacatcaccatgtgggccaccgtgttcctgcaggagaacccggacatgttcgcgagagcaaaggcggagcaggaggcgatcatgaggagtatcccgtcgtcgcagcaggggctgacgctcagggacttcaggaagatggagtacctgtcgcaggtgatcgacgagacgctgcggctcgtcaacatctccttcgtctccttccgtcaggccaccagagacgtcttcgtgaacggatacctcatccccaagggctggaaggttcagctctggtaccggagcgtgcacatggacccacaggtgtaccctgaccccaccaagttcgacccgtcgaggtgggagggccactcgccgagagccggcacgttcctggcgttcgggctgggcgccaggctctgccccggcaacgacctcgccaagctggagatttccgtcttcctccaccacttcctcctcggctacaagctggcgaggacgaaccctaggtgccgggtgaggtacctcccgcacccgaggccggtggacaactgcttggccaagatcaccagagtcggtagctga

SEQ ID NO: 498 - protein, 514 aa, Zea mays
MAAAVLLGAVALLLADAAARRAHWWYREAAEAVLVGAVALVVVDAAARRAHGWYREAALGAERRARLPPGEMGWPLVGGMWAFLRAFKSGKPDAFIASFVRRFGRTGVYRSFMFSSPTVLVTTAEGCKQVLMDDDAFVTGWPKATVALVGPRSFVAMPHDEHRRIRKLTAAPINGFDALTGYLPFIDSTVTSSLRAWADHGGSVEFLTELRRMTFKIIVQIFLGGADQATTRALERSYTELNYGMRAMAINLPGFAYRGALRARRRLVAVLQGVLDERRAARAKGVSGGGVDMMDRLIEAQDERGRRLDDDEIIDVLVMYLNAGHESSGHITMWATVFLQENPDMFARAKAEQEAIMRSIPSSQQGLTLRDFRKMEYLSQVIDETLRLVNISFVSFRQATRDVFVNGYLIPKGWKVQLWYRSVHMDPQVYPDPTKFDPSRWEGHSPRAGTFLAFGLGARLCPGNDLAKLEISVFLHHFLLGYKLARTNPRCRVRYLPHPRPVDNCLAKITRVGS

SEQ ID NO: 499 - DNA, 813 bp, Zea mays
  CDS (1)..(813)
atgtcgctgtcacgatttcgtgtcacaacgtcgagaataatggcatcatctctttgtgcttcttctgccatcgctgccatttcttctccaagtttcttgggtggtaagaaactgaggctgaagaagaagttgactgttccagctgtgtccaggccagatgcgtcggtgcgcgccgtcgcagctgatccagatagaccaatctggttcccgggaagcactcctccagagtggctagacggtagcctccctggtgacttcggatttgatcctcttggtctttcatcggacccggacagtctaaaatggaacgtacaagccgagatagtccactgccgatgggctatgctaggagccgccgggatattcatcccagagttcctaacgaagatcggaatcctcaacactccgtcatggtacacggcgggagagcaagagtatttcacggacaaaaccacactctttgtcgttgagctcattttgatcggatgggcagaaggacgtagatgggccgatatcatcaagcccggtagcgtcaacactgacccagtcttcccaaacaacaaactgacgggcacagacgttggttacccaggtgggttatggttcgacccgttgggttggggatccggtagcccggctaagctcaaggagttgaggaccaaggagatcaagaacggaaggttggctatgttggcagtgatgggtgcttggttccaacacatctacactggcactggtcctattgataacctttttgcacatcttgctgatcctggtcacgccacaatcttcgctgctttcacacccaagtga

SEQ ID NO: 500 - protein, 270 aa, Zea mays
MSLSRFRVTTSRIMASSLCASSAIAAISSPSFLGGKKLRLKKKLTVPAVSRPDASVRAVAADPDRPIWFPGSTPPEWLDGSLPGDFGFDPLGLSSDPDSLKWNVQAEIVHCRWAMLGAAGIFIPEFLTKIGILNTPSWYTAGEQEYFTDKTTLFVVELILIGWAEGRRWADIIKPGSVNTDPVFPNNKLTGTDVGYPGGLWFDPLGWGSGSPAKLKELRTKEIKNGRLAMLAVMGAWFQHIYTGTGPIDNLFAHLADPGHATIFAAFTPK

SEQ ID NO: 501 - DNA, 1308 bp, Zea mays
  CDS (1)..(1308)
atgcacgagctggagggccacacttctcttttgaggaccagtccaccgtccactcccagagtccaaaaccctacgatccgcgccaccatgccgcgcctcgccgccgccgccgccgtctcacgccgcgccggcgaggccctgcgccgcggcgcgtttgggggactgcggcctctctcctccctgcaaccgttaaacgccgcctccagcgacgaggtgctcgttgaaggaaagacaagtgcgcgcgctgccgtgctcaaccgccctggctacctcaacgccctcaccaccaccatgggagctaggctcaataaattttatcaatcatgggaggacaacccagacattggctttgtcatgatgaagggcagcggccgagcattctgtgctggtggggatgttgttagattacatgaacttatcagtgaaggcaagctggaggaatgtaaggattttttcaagactttgtacatgttcatttattttctgggcacgtacttgaaaccacatgttgccattcttgatggcattactatgggtggtggtggaggtgtttccatccctggaacattccgtgttgcaactgataggacagtctttgcaactccagaagttcatattggattccatcctgatgctgcagcctccttttatttgtcgcatctaactggccatgttggggaatatgtggccttgactggtgaaaagcttaatggaacagatatgattgctcttggccttgctacacactatttcatgagtggccatctggatctgatcgatgaacgacttgcaaagttagtaactgatgatccatcagttattgattcgtcccttgcacaatatggagacatggtttatccggacaaaaaaagcattgttcataggctggaggtgattgataaatgcttcagccatgacacagttgaagagattgttgatgccttggaaagtgaagcagccagctcaaatgaagaatggtgtatcttggcgctgaaacgattgaaagaggcctctccgttagctttgaaggtctcactgcgatcgatacgcgagggtagatatcagacacttgatgagtgccttgtccgtgagtaccgcatgtccatgaatggaatctcaaagcaattttctcatgaattctgcgagggagtcagagcacgactagtcgacaaggacttcactcctaagtgggatcctcctgcccttgagtatgttacgaatgacatggttgacgcatacttcgcacctcttggcgattcggagcctgagttgaagctgcctatagaatcgcgagaggcatttgtatga

SEQ ID NO: 502 - protein, 435 aa, Zea mays
MHELEGHTSLLRTSPPSTPRVQNPTIRATMPRLAAAAAVSRRAGEALRRGAFGGLRPLSSLQPLNAASSDEVLVEGKTSARAAVLNRPGYLNALTTTMGARLNKFYQSWEDNPDIGFVMMKGSGRAFCAGGDVVRLHELISEGKLEECKDFFKTLYMFIYFLGTYLKPHVAILDGITMGGGGGVSIPGTFRVATDRTVFATPEVHIGFHPDAAASFYLSHLTGHVGEYVALTGEKLNGTDMIALGLATHYFMSGHLDLIDERLAKLVTDDPSVIDSSLAQYGDMVYPDKKSIVHRLEVIDKCFSHDTVEEIVDALESEAASSNEEWCILALKRLKEASPLALKVSLRSIREGRYQTLDECLVREYRMSMNGISKQFSHEFCEGVRARLVDKDFTPKWDPPALEYVTNDMVDAYFAPLGDSEPELKLPIESREAFV

SEQ ID NO: 503 - DNA, 717 bp, Zea mays
  CDS (1)..(717)
  misc_feature (65)..(65): n at position 65 is a or g or c or t/u
atgacgacgcccggctcctgtcctgcgacaaccgccgccacccaccctcccatgtgcgccgctancgccgcaggtggatcgcaaaaaatggtgcgtccgcgactagtgctcttcggggactccatcaccgagcagtccttccgccccggtggctggggtgccgcactggctgatacctactcgcgcaaggctgatgtagttgtcagaggctatggtggatacaacacaagatgggctcttttcttagtacatcacatctttccgctggatggtttagcaccccctcttgcaaccactattttctttggagcaaatgacgcagccctgttaggaagaactggcgagcgacaacatgttccagtttcagaatataaaaataatctcaaaatgattgttaatcatttgaaggattgttctaattccatggttattgtgcttattacgccacctccaattgatgaagaaggaagagaaagatttgcacggtcactttatggacagaatgcgaggaagctacctgaaaggacaaatgaaatggctggggtctatgctggttattgcgtcgaactagctagagaaatgtgtataccctgtgttaatatctggtcaaagatgcaggagacagaaggatggcagaaactttacctaagtgacggtctgcatctgacacaggaaggaaacgcagttgtccacaaggaggttgtcgaagcattgtga

SEQ ID NO: 504 - protein, 238 aa, Zea mays
  misc_feature (22)..(22): Xaa can be Asn or Thr or Ser or Ile
MTTPGSCPATTAATHPPMCAAXAAGGSQKMVRPRLVLFGDSITEQSFRPGGWGAALADTYSRKADVVVRGYGGYNTRWALFLVHHIFPLDGLAPPLATTIFFGANDAALLGRTGERQHVPVSEYKNNLKMIVNHLKDCSNSMVIVLITPPPIDEEGRERFARSLYGQNARKLPERTNEMAGVYAGYCVELAREMCIPCVNIWSKMQETEGWQKLYLSDGLHLTQEGNAVVHKEVVEAL

SEQ ID NO: 505 - DNA, 1047 bp, Zea mays
  CDS (1)..(1047)
atgggcaacgtgagcggcggtacggcacaaggccacgacaggccaaaagagaggagacggagcaatggaattggaaggccacgagaggagtctgagctcgccgctttagcgagcgcaagcagagcctgccaaaaggctagagaaaaaaaaatccgccttctcctcccagtcgcaggccaggctcagcctcccctctcccctcctcggcatcttcgccgccggcgatctatctctctcacaatggcggcgcccatgtcagccatcgactcagcgtggcagctcctgatcgccaacttcaccgagttccagctcgccaccgtcgtcaccttcctgctccacgagaccgtcttcttcctctccggcctcccctccctcctcttcgagcgcttcggactcttcgccaagtacaagatccagaagaagagcaacacctctgcttaccaaaacagatgtgtcttgcgcctcattctctaccatgtatgtgtgaacctgcctgtcatgattttctcgtatcctgccttcaaattcatgggtctcaggagctctcttcctttgccacattggtcggttgttgtatctcaagttcttttctactttgtccttgaggattttatattctattgggggcacagggcattgcatacgaaatggctatacaaacacgttcacagcgtccaccacgagtacgccacaccctttggtttaacatcggaatatgcccacccagctgaaattttgttcctgggattcgccacagttgttggtcctgctcttactggccctcatctcttcaccctgtggctgtggatggtgttgagggttttggagacagttgaagctcacagcggctatcacttcccatggagcccatcaaatttcctgccgctgtatggcggctcggacttccatgactaccatcaccgtgtgctgtacacaaagtcagggaactatgcctcaacatttgtttacatggactggttgttcggcacggacaaggattatcgcaaggcaaagaccattgaggagaaagaagggaaaaatctgtga

SEQ ID NO: 506 - protein, 348 aa, Zea mays
MGNVSGGTAQGHDRPKERRRSNGIGRPREESELAALASASRACQKAREKKIRLLLPVAGQAQPPLSPPRHLRRRRSISLTMAAPMSAIDSAWQLLIANFTEFQLATVVTFLLHETVFFLSGLPSLLFERFGLFAKYKIQKKSNTSAYQNRCVLRLILYHVCVNLPVMIFSYPAFKFMGLRSSLPLPHWSVVVSQVLFYFVLEDFIFYWGHRALHTKWLYKHVHSVHHEYATPFGLTSEYAHPAEILFLGFATVVGPALTGPHLFTLWLWMVLRVLETVEAHSGYHFPWSPSNFLPLYGGSDFHDYHHRVLYTKSGNYASTFVYMDWLFGTDKDYRKAKTIEEKEGKNL

SEQ ID NO: 507 - DNA, 1320 bp, Zea mays
  CDS (1)..(1320)
atggatcgggcggaccctcggcgagggcaacttcggcaaggtgaagtacgcgcgccacatcgccaccggggccacttcgccatcaagatcctcgaccgcagcaagatcctctccctccgcatcgacgaccagatcaggagggagatcgggacgctcaagctgctcaagcacccgaatgtcgtccgcttgcacgaggttgctgccagtaaaacgaagatctacatggtgcttgagtttgtcaacggcggcgagctcttcgacaagatcgctatcaaggggaaactgtccgaacacgagggcaggaggctcttccagcagctaatcgacggcgtcagctattgccatgacagaggtgtctaccaccgagacctcaagccagagaatgtccttgttgatcggaagggcaccatcaagatctctgacttcggcctcagcgctctacctcaacatctcgggagtgacggacttctgcacacaacatgtggcagccccaactacatagctcctgaggttctgcaaaacagaggctatgacggctccttgtcagatctctggtcgtgtggggtgatcctctacgtgatgcttgttggctgccttcccttcgacgacaggaacctcgtcgttctttatcagaagattttcaagggagactgtcagatccccaagtggctttcgcctgccgcgcaggaccttctcaagaggatcctccaaccgaatccgatgaagaggatcaacgtcgcggggatcagggagcacgagtggttcaagaaggactacgtgcctgctgttccgcacgatgatgacgaagacgtccttcctagtccagctccctcgataaagccaatcgatgagccggcgcaagagaagtgttctcctatcaacgcttttcagttgatcgggatggcctcttcccttgacctttctggtttcttcgaggaagaggatgcagcgcaaagaaagattcggttcacttcgacgcacccacccaaggatctatttgacaagatcgagagcgttgtcatggagatgggattcaaagtccataggggggcaggcaagctcaaggtcttgaagaatagcaagtgttccaggaacccgtcatcattgttggtgtgcaccgaggtgtttgagctcggtccatcattatatgtcgtagagcttaggaaatcccacggagactctacgttgtatagacagctgtgcgaaaggctctccgatgagctaggtgcctgcaagacagaccagatcgcgaggactgaatcatcgagtgacgacctctcgagcgtcgatggcgaagcgttccctctatctgggttctga

SEQ ID NO: 508 - protein, 439 aa, Zea mays
MDRADPRRGQLRQGEVRAPHRHRGHFAIKILDRSKILSLRIDDQIRREIGTLKLLKHPNVVRLHEVAASKTKIYMVLEFVNGGELFDKIAIKGKLSEHEGRRLFQQLIDGVSYCHDRGVYHRDLKPENVLVDRKGTIKISDFGLSALPQHLGSDGLLHTTCGSPNYIAPEVLQNRGYDGSLSDLWSCGVILYVMLVGCLPFDDRNLVVLYQKIFKGDCQIPKWLSPAAQDLLKRILQPNPMKRINVAGIREHEWFKKDYVPAVPHDDDEDVLPSPAPSIKPIDEPAQEKCSPINAFQLIGMASSLDLSGFFEEEDAAQRKIRFTSTHPPKDLFDKIESVVMEMGFKVHRGAGKLKVLKNSKCSRNPSSLLVCTEVFELGPSLYVVELRKSHGDSTLYRQLCERLSDELGACKTDQIARTESSSDDLSSVDGEAFPLSGF

SEQ ID NO: 509 - DNA, 678 bp, Zea mays
  CDS (1)..(678)
atggcagagcataaagggaacgttctcttgcacaagtatgagatggggaaattgcttggtcaaggcacctttgccaaggtttaccatgctcgtaacacggcgacttcagaaagtgtcgcgatcaaagtgattgataaggagaaggttatgaaggttggtctcattgatcaaatccagcgagaaatttctgtgatgaagcttgttaggcatccaaacatcgtacagctctatgaggtcatggccaccaaaaccaaaatatactttgtgctggaacatgttaaaggtggagagctgttcaacaagattcagcgaggaaggctcaaggaagacgcagcgaggaagtacttccagcagttgatctgtgcggtggacttctgccacagcaggggtgtctatcatcgagatttgaagccagaaaatcttttgctcgatgagaatagcaacctgaaggtatcagattttggtctaagcgcacttgctgaatgccatagacaagacggcctgctccacacgacttgtggcacgcctgcttatgttgccccagaggtgattaacagaaagggttatgatggtgcaaaggctgacatatggtcttgtggggtcatcctgtttgtgctattggctggttatcttccgttccatgataagaacttgatggacatgtataaagaagattga

SEQ ID NO: 510 - protein, 225 aa, Zea mays
MAEHKGNVLLHKYEMGKLLGQGTFAKVYHARNTATSESVAIKVIDKEKVMKVGLIDQIQREISVMKLVRHPNIVQLYEVMATKTKIYFVLEHVKGGELFNKIQRGRLKEDAARKYFQQLICAVDFCHSRGVYHRDLKPENLLLDENSNLKVSDFGLSALAECHRQDGLLHTTCGTPAYVAPEVINRKGYDGAKADIWSCGVILFVLLAGYLPFHDKNLMDMYKED

SEQ ID NO: 511 - DNA, 1692 bp, Zea mays
  CDS (1)..(1692)
atggctccacttctcgccgcagccatgaaccacgctgcccatccagtccttagaagccatctaggacccaacaatgagagtttctcacgacaccacctatcttcttcaccgcaaagcagtaagcgaaggtttaaccttagctttacgccacgatctgcaagagtaggcaatcaaaatggagtccaattgttgagcccttcggaaatccctcgaagggactggttcccctctgacttcatctttggtgccgccacttcagcgtaccaaattgaaggtgcttggaacgaagatggaaagggggaaagcaattgggatcacttctgccacaattttccggaaaggataatggacgggagcaatgcagacattggagcgaattcgtaccatatgtacaaaacggatgtcagattgctgaaggaaatgggcatggacgcatataggttctctatctcttggcctagaatactgcctaagggaacggtcgaaggaggtattaaccaggatggcatcgattactacaaaaggctcatcaacttgttgctagagaatggcatagagccatatgtaacaattttccactgggatgtccctcaagcactagaagagaagtacggcggattcttagataagactcagaagaggattgtaaatgattacaaaaacttcgctaaggtgtgcttcgacaactttggtgacaaggtgaagaattggttgacctttaatgagccccagacatttacttcattttcctatggaaccggggtctttgccccaggacgatgctcaccgggactagactgtgccatcccaactgggaattcactcgtcgaaccttacattgctggccacaacattcttctagcccacgctgaggctgttgatctttacaacaagtattacaagggcgagaacggccgcataggtcttgcatttgatgtaatgggtcgtgtgccatacggaacatcatttctagatgaacaggccaaagaaaggtccatggacattaacctaggatggttcttggagcctgtggttcgtggtgactaccccttctcaatgagatcgttagcgagggaacgactacccttcttcagtgacaaacagcaagagaagcttgtgggatcctataacatgttgggaataaactactacacctcaatattctccaaacatatcgacatctcaccaaaatactcgcctgttctcaacactgacgacgcctacgctagtcaagaaacgtatgggcctgacgggaaacccattggtcctcctatgggaaatccgtggatctacttatacccagaaggcctaaaggatatccttatgatcatgaagaacaaatatggaaacccacctatctacatcactgagaacggaatcggggatgttgatacaaaggagaaacctctacccatggaggctgccttaaatgactacaaaaggctagattacatccagcgccacatctcaactctcaaggagtcaatagacttgggagcaaatgtgcatggctacttcgcttggtctctgctggataactttgaatggtacgccggctacaccgaacgttatggcattgtctacgtcgaccgcaaaaataactacacgcgctacatgaaggagtcagccaagtggttaaaagagttcaatactgcgaagaagcctagcaagaagattattacgccagcttga

SEQ ID NO: 512 - protein, 563 aa, Zea mays
MAPLLAAAMNHAAHPVLRSHLGPNNESFSRHHLSSSPQSSKRRFNLSFTPRSARVGNQNGVQLLSPSEIPRRDWFPSDFIFGAATSAYQIEGAWNEDGKGESNWDHFCHNFPERIMDGSNADIGANSYHMYKTDVRLLKEMGMDAYRFSISWPRILPKGTVEGGINQDGIDYYKRLINLLLENGIEPYVTIFHWDVPQALEEKYGGFLDKTQKRIVNDYKNFAKVCFDNFGDKVKNWLTFNEPQTFTSFSYGTGVFAPGRCSPGLDCAIPTGNSLVEPYIAGHNILLAHAEAVDLYNKYYKGENGRIGLAFDVMGRVPYGTSFLDEQAKERSMDINLGWFLEPVVRGDYPFSMRSLARERLPFFSDKQQEKLVGSYNMLGINYYTSIFSKHIDISPKYSPVLNTDDAYASQETYGPDGKPIGPPMGNPWIYLYPEGLKDILMIMKNKYGNPPIYITENGIGDVDTKEKPLPMEAALNDYKRLDYIQRHISTLKESIDLGANVHGYFAWSLLDNFEWYAGYTERYGIVYVDRKNNYTRYMKESAKWLKEFNTAKKPSKKIITPA

SEQ ID NO: 513 - DNA, 1359 bp, Zea mays
  CDS (1)..(1359)
atggctccctcctccttcctcctccctgcaaatcctgcaggcaccaccgctcgttttcctgtccgggggacaggagagaaggggagagaccgagagagggtgaggcgcggcgtccgcccgatctgctccgccccccgaagcagcctgtcacgtcgtcctcactctcagcaaccagcgaaaatgggtgccggaggcaggatgaccgagaaggagcgggagaagcatgagcaggagcaggtcgcccgtgctaccggcggtggcgcggcagtgcagcggtcgccggtggagaagccgccgttcacgttggggcagatcaagaaggcgatcccgccgcactgcttcgagcgctccgtgctgaggtccttctcgtacgtggcccacgacctgtcgctcgccgcggcgctcctctacctcgcggtggccgtgataccggcgctaccctgcccgctccgctacgcggcctggccgctgtactgggtggcccaggggtgcgtgtgcacgggcgtgtgggtgatcgcgcacgagtgcggccaccacgccttctccgaccacgcgctcctggacgacgccgtcggcctggcgctgcactcggcgctgctggtgccctacttctcgtggaagtacagccaccggcgccaccactccaacacggggtccctggagcgcgacgaggtgttcgtgccgaggacgaaggaggcgctgccgtggtacgccccgtacgtgtacggcagcccggtgggccggctggtgcacgtcgtggtgcagctcaccctggggtggccgctgtacctggcgaccaacgcgtcggggcggccgtacccgcgcttcgcctgccacttcgacccctacggcccgatctacggcgaccgggagcgcgcccagatcttcgtctcggacgccggcgtcgtggccgtggcgttcgggctgtacaagctggcggcggcgttcggggtctggtgggtggtgcgcgtgtacgccgtgccgctgctgatcgtcaacgcgtggctggtgctcatcacgtacctgcagcacacccacccggcgctgccccactacgactcgggcgagtgggactggctgcgcggcgcgctcgccaccgtcgaccgagactacggcgtcctcaaccgcgtgttccaccacatcacggacacgcacgtcgcgcaccacctcttctccaccatgccgcactaccacgccgtggaggccaccagggcgatcaggcccgtcctcggcgagtactaccagttcgacccgacccctgtcgccaaggccacctggcgcgaggccagggagtgcatctacgtcgagcctgagaaccgcaaccgcaagggcgtcttctggtacaacagcaagttctga

SEQ ID NO: 514 - protein, 452 aa, Zea mays
MAPSSFLLPANPAGTTARFPVRGTGEKGRDRERVRRGVRPICSAPRSSLSRRPHSQQPAKMGAGGRMTEKEREKHEQEQVARATGGGAAVQRSPVEKPPFTLGQIKKAIPPHCFERSVLRSFSYVAHDLSLAAALLYLAVAVIPALPCPLRYAAWPLYWVAQGCVCTGVWVIAHECGHHAFSDHALLDDAVGLALHSALLVPYFSWKYSHRRHHSNTGSLERDEVFVPRTKEALPWYAPYVYGSPVGRLVHVVVQLTLGWPLYLATNASGRPYPRFACHFDPYGPIYGDRERAQIFVSDAGVVAVAFGLYKLAAAFGVWWVVRVYAVPLLIVNAWLVLITYLQHTHPALPHYDSGEWDWLRGALATVDRDYGVLNRVFHHITDTHVAHHLFSTMPHYHAVEATRAIRPVLGEYYQFDPTPVAKATWREARECIYVEPENRNRKGVFWYNSKF

SEQ ID NO: 515 - DNA, 810 bp, Zea mays
  CDS (1)..(810)
atggtgcgggtggtgaagagcaagaaggcgaaaagtttattagtcataagcttgactactagtgttagtggcattgtctgttctatgggtttggtttggtgcttcatgagtttgaagacgaagcatactagaagggcaagaaaggatcaagggaagcaagaatacgacgagtctattgacggcgagttcgagaaagggaggggcccaagaagatttcgatacgacgagctcgtgtctgctacgaagaacttcgctttggagagaaagctcggagaaggaggcttcggagccgtttacaagggttccctgaaggacccgaacctcaccgtcgccataaagcgagtcgccaaaggatcgacgcaggggaagaaggagtacatctctgaggtgaagatcatcagccggctgaggcacaggaacctcgtgcagctcgtgggctggtgccatgagcgtggggagttcttgctcgtgtacgagttcatgccgaacaggagcttgaacacgcacctctacgacagcagcaacctgctagcgtggccgctgcggttcaagatcaccgtcggcgtcgcgtctgcactcctgtacctccacgaggagtgggagcaatgcgtcgtgcaccgcgacgtgaagccaagcaacgtgatgctggactcatcgttcaacgctaagcttggggacttcgggctggcacgactcgtagaccacgaccgaggctcgcagactacggtgatagctggcacgatggggtacctggctccagagtgcgtcaccacgggcaaggcaagcaaagagtccgacgtgtacagctga

SEQ ID NO: 516 - protein, 269 aa, Zea mays
MVRVVKSKKAKSLLVISLTTSVSGIVCSMGLVWCFMSLKTKHTRRARKDQGKQEYDESIDGEFEKGRGPRRFRYDELVSATKNFALERKLGEGGFGAVYKGSLKDPNLTVAIKRVAKGSTQGKKEYISEVKIISRLRHRNLVQLVGWCHERGEFLLVYEFMPNRSLNTHLYDSSNLLAWPLRFKITVGVASALLYLHEEWEQCVVHRDVKPSNVMLDSSFNAKLGDFGLARLVDHDRGSQTTVIAGTMGYLAPECVTTGKASKESDVYS

SEQ ID NO: 517 - DNA, 1323 bp, Zea mays; identical to SEQ ID NO: 289
  CDS (1)..(1323)

SEQ ID NO: 518 - protein, 440 aa, Zea mays; identical to SEQ ID NO: 290

SEQ ID NO: 519 - DNA, 768 bp, Zea mays
  CDS (1)..(768)
atggccgcgtccacgccggcgcgcgggggcttcaagcgcccattcccgccgccgtcgcctgcaaagcacatccgtgcgatgctggccggcgccacggctcggtcaagcctaacgaggcgtccatccccgaagcggcgagctggaccttgggctggacaagagcttcggctactccaggcactttgcggccaagtacgaccttggcgggaggtggggcgcggccactttggcttcacctgcgctgccaagtgcaagaagggcgagctcaagggcgaggacgtcgccgtcaaggtcattcccaaggccaagatgactactgctattgccattgaagatgtcagacgagaagtcagaatattgagttctttggcagaccacatcaacctagtgcagtttcatgatgcttttgaggatgaagaaaatgtatatgttgttatggagttatgcaaaggaggtgaactgctggacaggattttggctagaggtggaaaatattccgaggaagatgctaaggttattattcaccaaattctaagtgttgcttcattttgccatcttcagggtgttgttcaccgggatctgaaaccagagaattttcttttcatgtcaaaggatgagaattctgccttgaaagtcatagactttggtttatctgactttgttaaaccagacgacagacttaatgacattgttggaagtgcatattatgttgctcctgaagttctccatcgatcttatggcacagaggcagatatgtggagcatttga

SEQ ID NO: 520 - protein, 255 aa, Zea mays
MAASTPARGGFKRPFPPPSPAKHIRAMLAGATARSSLTRRPSPKRRAGPWAGQELRLLQALCGQVRPWREVGRGHFGFTCAAKCKKGELKGEDVAVKVIPKAKMTTAIAIEDVRREVRILSSLADHINLVQFHDAFEDEENVYVVMELCKGGELLDRILARGGKYSEEDAKVIIHQILSVASFCHLQGVVHRDLKPENFLFMSKDENSALKVIDFGLSDFVKPDDRLNDIVGSAYYVAPEVLHRSYGTEADMWSI

SEQ ID NO: 521 - DNA, 891 bp, Zea mays
  CDS (1)..(891)
atggcacgagtattgcgcaagcacggaacacccatccccgactgtatgtttgcccggcaatgcaaacatctccggcatgccatggcgtccactgtaacagccgtcaatagcagccatggaagcgccctgcgtacccgtaccgcctccccaaggccggtcgcgggctggagctgcagacgcacgctttccacgcctgcacaccaccaccacgcgcggtcgtcacccagagctcgggttgtcgccgtccgagccgccggcactcagcgggcgacctggttgcccggactggacccgcccccatacctcgacggcacactaccaggtgacttcggcttcgaccccctgggcctcggcgaggagcccgaagccttgaagtggtacgttcaggccgagctcgtgcactgccggttcgccatggcaggggtcgccggcatccttttcactgacttgctccgcgtatcagggaacagcgacctccccgtgtggttcgaagcaggcgcggcgaaattcgacttcgcgaacaccacggcgctcttcttcgtccagctcttcttgatggggttcgctgaaaccaagaggtacatggacttcaaaaatccaggatcgcaagcagaggaagggacattcatagggttagaggctgcactcgcaggtcaacagccaggctaccccgggggcccactgttcaatccactaggactcgcaaaggatatagagaatgctcatgacgagaagctcaaagaaatcaagaacgggaggttggcaatggtagccatgcttggcttcatggtgcaagcatccgtaactcatgccggccccatcgacaatctcttgacacacctttcggacccgttcaacaaaaatatcattcacacattctcctcttcctga

SEQ ID NO: 522 - protein, 296 aa, Zea mays
MARVLRKHGTPIPDCMFARQCKHLRHAMASTVTAVNSSHGSALRTRTASPRPVAGWSCRRTLSTPAHHHHARSSPRARVVAVRAAGTQRATWLPGLDPPPYLDGTLPGDFGFDPLGLGEEPEALKWYVQAELVHCRFAMAGVAGILFTDLLRVSGNSDLPVWFEAGAAKFDFANTTALFFVQLFLMGFAETKRYMDFKNPGSQAEEGTFIGLEAALAGQQPGYPGGPLFNPLGLAKDIENAHDEKLKEIKNGRLAMVAMLGFMVQASVTHAGPIDNLLTHLSDPFNKNIIHTFSSS

SEQ ID NO: 523 - DNA, 903 bp, Zea mays
  CDS (1)..(903)
  misc_feature (32)..(32): n at position 32 is a or g or c or t/u
atggcacaccaaggagagtacgtggaggagcnagccatggcttcatcggtggccgccgcggcgagcacattcctgggcacccgcctggcggacccggcgccacagaacgggcgcatcgtggcccggttcgggttcgggttgggcggcaaggcgaagcctgctccgaagaaggtggcgaagacatcgacctcctctgaccggccgctgtggttccccggcgccgtggcgcccgactacctggacggctcgctggtcggcgactacgggttcgacccgttcggtctcgggaagcccgtggagtacctgcagttcgagttggactcgctggaccagaacctggccaagaatgaggccggcggcatcatcggcacccggttcgagtcctccgaagtcaagtccaccccgttgcagccctacagcgaggtgttcggcctccagcggttccgcgagtgcgagctcatccacggccgctgggccatgctcgccaccctcggcgccctctccgtcgagtggctcaccggcgtcacctggcaggacgccggcaaggtggagctggtggacgggtcctcctacctgggccagccgctgccgttctccatctcgacgctcatctggatcgaggtgctcgtgatcggctacatcgagttccagcgcaacgccgagctcgacccggagaagaggctgtaccccggcggctcctacttcgacccgctcggcctggcggccgaccctgagaagaaggagcggctgcagctggcggagatcaagcacgcgcgcctcgccatggtcgccttcctcggcttcgccgtgcaggccgccgccaccggcaaggggccgctcaacaactgggccacccacctgagcgacccgctccacactaccatcttcgacacgttcggatga

SEQ ID NO: 524 - protein, 300 aa, Zea mays
  misc_feature (11)..(11): Xaa can be Arg or Gln or Leu or Pro
MAHQGEYVEEXAMASSVAAAASTFLGTRLADPAPQNGRIVARFGFGLGGKAKPAPKKVAKTSTSSDRPLWFPGAVAPDYLDGSLVGDYGFDPFGLGKPVEYLQFELDSLDQNLAKNEAGGIIGTRFESSEVKSTPLQPYSEVFGLQRFRECELIHGRWAMLATLGALSVEWLTGVTWQDAGKVELVDGSSYLGQPLPFSISTLIWIEVLVIGYIEFQRNAELDPEKRLYPGGSYFDPLGLAADPEKKERLQLAEIKHARLAMVAFLGFAVQAAATGKGPLNNWATHLSDPLHTTIFDTFG

SEQ ID NO: 525 - DNA, 867 bp, Zea mays
  CDS (1)..(867)
atgggtcgacttcgctgtcgacgatttcgtcgctccggctgcgctctgccttgctttcctgctacctgctctagcgcgagcgagagaggtacggcggccgatctggcggcgcaggcggagggctcggccggggccggcaagtcggcgccgaacatggggaggggccgggtcgagctcaagcggatcgagaacaagatcaaccgccaggtcacctccgccaagcgccgcaacggcctgctcaagaaggcgtacgagctctcggtgctctgcgacgccgaggtcgcgctcatcatcttctccaaccgcggcaagttctacgagttctccagcacgcagagcatgccaaaaacacttgaaaagtaccaaaaatgcagttttgcagggcctgaaacagcactccagaatagagagaatgagcaactgaaaagtagccgcaatgagtacctcaaactgaaggcacgtgttgataatttacagcggactcaaaggaacttgcttggtgaagatcttgagtcattaggcataaaagagctggagcacctggagaagcagctcgattcgtccttgaagcacataagatctacaaggacacaacacatggttgatcaactgacagaacttcagaaaaaagaacaaatgttttgtgaagcaaataagtgtcttcgaagaagactggaggagagcaaccaggttatatggcagcatgcgtgggagcaaagcgagcggcattctgaagtgcagccgcagcagctcaatggcaataacttcttccatcccctcgatggtgctggtgaacccacccttcagatagggtatccttcagaggcactgactagctcatgcatgaccaccttcctgcccccgtga

SEQ ID NO: 526 - protein, 288 aa, Zea mays
MGRLRCRRFRRSGCALPCFPATCSSASERGTAADLAAQAEGSAGAGKSAPNMGRGRVELKRIENKINRQVTSAKRRNGLLKKAYELSVLCDAEVALIIFSNRGKFYEFSSTQSMPKTLEKYQKCSFAGPETALQNRENEQLKSSRNEYLKLKARVDNLQRTQRNLLGEDLESLGIKELEHLEKQLDSSLKHIRSTRTQHMVDQLTELQKKEQMFCEANKCLRRRLEESNQVIWQHAWEQSERHSEVQPQQLNGNNFFHPLDGAGEPTLQIGYPSEALTSSCMTTFLPP

SEQ ID NO: 527 - DNA, 654 bp, Zea mays
  CDS (1)..(654)
  misc_feature (642)..(642): n at position 642 is a or g or c or t/u
atgcgcgggaaggtggtgctgcagcggatcgagaacaagatcagccggcaggtgaccttcgccaagcgccggaacggcctgctcaagaaggcgtacgagctctccatcctctgcgacgccgaggtcgcgctcgtcctcttctcccacgccggccgcctctaccagttctcatcctcctccaatctgcttaagactctagagcggtaccagaggtacatctatgcttcagccgatgctgcagtgccatctagcgatcagatgcagaataactatcaagaatatgtgaagctgaaggcacgagttgaggttttacagcactcacaaaggaatcttcttggtgaagatctggccctacttagcccaagtgaacttgaccagcttgagaatcaagtagacaagaccttgaagcaaataagatcaagaaagactcaagtgttacttgatgaactttgtgacttaaagagaaaggaacaaatgctgcaagatgcaaacagggttctgaaaaggaagctgggcgagtttgaggcagaggcggcttctcccccgcagttagcgtggcaaggcgaaggcggcatgttgtcccatgaccctccacagccagaacacttcttccaggctctggagagcaacccatataccatncgatggacatga

SEQ ID NO: 528 - protein, 217 aa, Zea mays
  misc_feature (214)..(214): Xaa can be Ile or Met
MRGKVVLQRIENKISRQVTFAKRRNGLLKKAYELSILCDAEVALVLFSHAGRLYQFSSSSNLLKTLERYQRYIYASADAAVPSSDQMQNNYQEYVKLKARVEVLQHSQRNLLGEDLALLSPSELDQLENQVDKTLKQIRSRKTQVLLDELCDLKRKEQMLQDANRVLKRKLGEFEAEAASPPQLAWQGEGGMLSHDPPQPEHFFQALESNPYTXRWT

SEQ ID NO: 529 - DNA, 522 bp, Zea mays
  CDS (1)..(522)
atgcaccgcaaccgcatgcaactgcgccgcctctcgcctctcctagcgagcccgcgccgccgcctgcgattgcgctcccccacaaaccctagctctgccaccatgtccccgggcgccgctcacctggccactgccgccgacccggacgaggacctctgcgcgagcgccggggcgtcagaagcggaggtccccgcgcctgccccgcatcttccaccgctgccggtgtccgcggaggagcggttggaacgcgcctgggcgcactggaggcggctggggtccccacggctgctggtggcgccgatggtggacaactcggagctccccttccgcatgctgtgccgccgctacggcgccgacgcggcgtacacgcccatgctccactctcgcatcttctccgagaatgagaagtacaggtccatggagttcaccacgtgcaaggaggaccgaccactttttgttcagttttgtgccaatgatcctgacattttgttgcaagctgcgaagaaggtggaaccatattga

SEQ ID NO: 530 - protein, 173 aa, Zea mays
MHRNRMQLRRLSPLLASPRRRLRLRSPTNPSSATMSPGAAHLATAADPDEDLCASAGASEAEVPAPAPHLPPLPVSAEERLERAWAHWRRLGSPRLLVAPMVDNSELPFRMLCRRYGADAAYTPMLHSRIFSENEKYRSMEFTTCKEDRPLFVQFCANDPDILLQAAKKVEPY

SEQ ID NO: 531 - DNA, 1047 bp, Zea mays
  CDS (1)..(1047)
atgcggaagaggcctccagcggatgtacaagtcaatggtgtggcggaacaagagccgaggagcggtggcgttagagcagagggggaggccaaactgaggaccaaggacatgcccaatggcgtccagggggagcacgtggcagcaggatggccgagatggctcacagaggtggcggcagaggcggttcgtgggtggcaacctcggagggccgagtcttttgagaagttggacaagataggacaaggtacgtatagcagcgtttataaagcacgtgatcttgagaatggaaaaattgtcgctctgaagaaagttcggtttgccaatatggaccctgagagtgtccgatttatggcaagggaaatccacatcttaagaaggcttgatcatccaaatgttatcaaacttgaaggtttggtgacgtcacgcatgtcaagcagcttgtatcttgtatttgaatacatggagcacgaccttgcaggccttgcagctaccccaggcttaaaattctcagaacctcaggtcaagtgttacatgcaacagctactctctggacttgaccattgtcataaccgtggtgttttgcatcgggatataaagggtgcaaatctcttacttgacaataatggcattcttaaaatagcagattttggtctagctacattctttaatcccaatcaaaaacaacatttgacaagtcgtgtagtaacattgtggtaccggcctcctgagcttttgttgggttctactaactatggtgctgctgttgatctatggagtgccggttgcattcttgctgagttgctgtcagggaagcctatcatgccaggacgaactgaggtggaacagttacacaagatttttaagctttgtggttcaccatcagaggacttttgggctaatctgaagttatcccgagctaccatattcaagcctcagcatccgtaccgccgatgtgtgaatgatgtatataaggacttccctactactgctttaacacttctggactatctacttgcggtgtttgtcagtttggtcattctatcttga

SEQ ID NO: 532 - protein, 348 aa, Zea mays
MRKRPPADVQVNGVAEQEPRSGGVRAEGEAKLRTKDMPNGVQGEHVAAGWPRWLTEVAAEAVRGWQPRRAESFEKLDKIGQGTYSSVYKARDLENGKIVALKKVRFANMDPESVRFMAREIHILRRLDHPNVIKLEGLVTSRMSSSLYLVFEYMEHDLAGLAATPGLKFSEPQVKCYMQQLLSGLDHCHNRGVLHRDIKGANLLLDNNGILKIADFGLATFFNPNQKQHLTSRVVTLWYRPPELLLGSTNYGAAVDLWSAGCILAELLSGKPIMPGRTEVEQLHKIFKLCGSPSEDFWANLKLSRATIFKPQHPYRRCVNDVYKDFPTTALTLLDYLLAVFVSLVILS

SEQ ID NO: 533 - DNA, 843 bp, Zea mays
  CDS (1)..(843)
  misc_feature (839)..(840): n at positions 839 and 840 is a or g or c or t/u
atggttgttgttgacagggtcagcgaggtggtcggcgaggttctcaacgggacccttgccggtgacgatggcctgcacgaagaagccgaacatggagaacatggcgaggcggccgttcttgatctccttgaccttgagctccgcgaacgcctccgggtcgtcggcgagcccgagcgggtcgaagctgccgccggggtacagcgggtcgaccacctccccgagcgggccaccggcgatgcggtacccctcgacggcgcccatgagcaccacctggcacgcccagatggccaggatgctctgcgcgtggatcaggctcgggttgccgaggtagtcaagcccgccctcgctgaagatctgggacccggccttgaaccacacggcctcgccgaacttgacgccgttgcgggcgagcagctccgggaacacgcacccgagcgcgcccagcatggcccagcggcagtggatcacctccagctcgcggttcttggcgaaagtctccgggtcggcggacagccccgcggtgtcccagccgtagtcgccggggaactcgccggtcaggtagcttgggggctggccggacagcgggcccaggtacaggacgcggtcggccccgtaccaggggctgccggacgccgctggcttgggcttgccagcagtcttgcgcatggtgatgcgcccctcgccgaagacgtccctggtgctggtcgccggcttgccgacgagcgcgcgggaggtgagagccatggtggcggcggccatgtcgatcagatcacagctttttcggatgcttacctcactctgtgctgtgtatgcgtgcgacgaaatcgtcgacagcgaanntga

SEQ ID NO: 534 - protein, 280 aa, Zea mays
  misc_feature (280)..(280): Xaa can be any amino acid
MVVVDRVSEVVGEVLNGTLAGDDGLHEEAEHGEHGEAAVLDLLDLELRERLRVVGEPERVEAAAGVQRVDHLPERATGDAVPLDGAHEHHLARPDGQDALRVDQARVAEVVKPALAEDLGPGLEPHGLAELDAVAGEQLREHAPERAQHGPAAVDHLQLAVLGESLRVGGQPRGVPAVVAGELAGQVAWGLAGQRAQVQDAVGPVPGAAGRRWLGLASSLAHGDAPLAEDVPGAGRRLADERAGGESHGGGGHVDQITAFSDAYLTLCCVCVRRNRRQRX

SEQ ID NO: 535 - DNA, 1533 bp, Zea mays
  CDS (1)..(1533)
atggcaccagcacctattagctcgcctcccccacttatcaaatcttctcctccaccggttccggttagctcaccaccaccactactaaaatcgcctccacctccagtatctatgagtttaccacctccatctgtgaaatctccaccgccgttgccagcaaggtcacctccagcgccagtgaaatcaccacctcctccaccaccagtaagttcgccgccaccaccagtaccggtgaggtcaccaccaccgccaccaccatcaccgattagttcaccaccgccatcaatgaaatctccacccccaccagcacctattagctcgcctcccccacctaccaaattccctcctccaccggtttcggttagctcaccaccactagtaaaatcacctccatctccagcatatgtgagtgaaccgcctccaacggtgaaatctccttcaccaccatcacctccaccgatgattaaatcaccgccaccaccggtgccggtgaggtcacctccatcgtcagtgaaatcaccacctccttcaccactgttaagttcgccgccgccaccagcgccggtgaggtcacctccaccgctaacgaaatcatcacctcctccaccaccgataaggtcgccacccccaccacaagcaaactcacctcctccatcagctctaataagctcacctcctcctccgatgcaatcccctccaccgcctgctccagtcagctcaccaccaccacctataaaatcaccaccaccggctccagtaagctcaccacctcctctggcgcaatcccctccaccacctgctccagtcagctcactaccaccacctgtaaaatcacctcctccaccggctccagttagctcaccaccgcctcctgtgaaatactcttcaccacctactccagtcaactcaccgccaccacctgtaaaattacctcctccactagctccaatggtttcaccatcgtctcccatgaaatcccctccaccaacggcacccgttagctcgccgccaccgcctgtaaaatcacctcctccaccggctcctgtgatttcaccatcacctccggtgaaaatccttccaccaccggcaccagttagctcacctcccccgccagttcccgtgagctcagcacccccatttgcaaaatccccaccgccacagttcaaatcacctgcaccaccaacttcgagaagatctccacctccaccggtgaagcccccgccaccaccgccacttgtaagctctccaccactgccaccaatgacctccccacctccaccaacactggcgagctcaccgcctcctccagtgaggtcccctcctccaccggcgccaatcaactctccacccccaccggtcaaatccccaccaccacctgctccggtgagctcgccacctccaccagccgtcccatcaccacctccacccgcaccatcatcacctccaccgtcggcacctgaggagttcatcttgccaccaatcatggcgcagcagtatgcgtcgccaccgccgcctcagttccaaggatactga

SEQ ID NO: 536 - protein, 510 aa, Zea mays
MAPAPISSPPPLIKSSPPPVPVSSPPPLLKSPPPPVSMSLPPPSVKSPPPLPARSPPAPVKSPPPPPPVSSPPPPVPVRSPPPPPPSPISSPPPSMKSPPPPAPISSPPPPTKFPPPPVSVSSPPLVKSPPSPAYVSEPPPTVKSPSPPSPPPMIKSPPPPVPVRSPPSSVKSPPPSPLLSSPPPPAPVRSPPPLTKSSPPPPPIRSPPPPQANSPPPSALISSPPPPMQSPPPPAPVSSPPPPIKSPPPAPVSSPPPLAQSPPPPAPVSSLPPPVKSPPPPAPVSSPPPPVKYSSPPTPVNSPPPPVKLPPPLAPMVSPSSPMKSPPPTAPVSSPPPPVKSPPPPAPVISPSPPVKILPPPAPVSSPPPPVPVSSAPPFAKSPPPQFKSPAPPTSRRSPPPPVKPPPPPPLVSSPPLPPMTSPPPPTLASSPPPPVRSPPPPAPINSPPPPVKSPPPPAPVSSPPPPAVPSPPPPAPSSPPPSAPEEFILPPIMAQQYASPPPPQFQGY

SEQ ID NO: 537 - DNA, 1029 bp, Zea mays
  CDS (1)..(1029)
atgtcaccagtaagaaagatggatggtttgaggagcccaccacatcccttgcctcttcctccagattctggtgcatgctcgcctcttcatccagcttctggtgcatgctcgcctcttcatccagcttctggtgcttgctcacctcttcttccaacccacagtttttgctcgcctcttccttcgtctcccagttcctgcccacctcttcctgcatctcccactaactgctcacagtcccagtcacaatggaagaaagggaaattgctagggagtggtacatttggtcaggtttaccttggatttaacagtgaaaatgggcagttttgtgcgattaaggaggttcaagttattatggatgatccacattcgaaggaacgactcaaacaattaaaccaggaaatagatatgcttagacaactctcccacccaaacatagtgcagtaccatggaagtgagctgagtgatgaatcactttccatttgtcttgagtatgtttcggggggttcaatccacaaattattaagagaatatggctcttttaaggaacctgtgattcgtaattacactgggcaaattcttgctggccttgcctacttacatgggcggaacactgtccacagagatatcaaaggagcaaacatactcgtgggtcctaatggtgaagtcaagctggctgactttggcatggctaagcatgtatcatcttttgctgaaatacgttctttcaaaggaagtccttactggatggctcttgaggttataatgaactgtaaaggctacagtttatcagtggacatatggagtctgggctgtaccattattgaaatggcgacggcaagacctccttggcaccaatacgagggggtagcagcaatatttaagatcgcaaacagtaaagatatacctgaaatcccagacagtttctcagaggaagggaaaagtttcttgcagctttgcttgaaacgtaaccctgcatctcatgcttctgcagtccagctgatggatcatccttttgttcaggatcactga

SEQ ID NO: 538 - protein, 342 aa, Zea mays
MSPVRKMDGLRSPPHPLPLPPDSGACSPLHPASGACSPLHPASGACSPLLPTHSFCSPLPSSPSSCPPLPASPTNCSQSQSQWKKGKLLGSGTFGQVYLGFNSENGQFCAIKEVQVIMDDPHSKERLKQLNQEIDMLRQLSHPNIVQYHGSELSDESLSICLEYVSGGSIHKLLREYGSFKEPVIRNYTGQILAGLAYLHGRNTVHRDIKGANILVGPNGEVKLADFGMAKHVSSFAEIRSFKGSPYWMALEVIMNCKGYSLSVDIWSLGCTIIEMATARPPWHQYEGVAAIFKIANSKDIPEIPDSFSEEGKSFLQLCLKRNPASHASAVQLMDHPFVQDH

SEQ ID NO: 539 - DNA, 828 bp, Zea mays
  CDS (1)..(828)
atgccaaggtcatcagccggggcgtcatgcacagcagatgaccattctgagcagagcagaaaggatgatgaatatgagaggctggttacaagagctcaacatgcaacatctgatgttggcacgacaattttatctgagcaaccaaagtcaagatctttcatttggtggatgaaagttctgcttggctgtttccttcttatattagtgggctatgtcttcgtgaaatggggggtcccctttgtctttgagaaggttctcttgccaatcatgcaatgggaagccagtgcttttgggcgtccagtattagctattgttctcgttgcatctttggctctctttccagttattctagttccttctggaccttctatgtggttagcaggaatgatctttggatatggttggggtttcttgattataatggccgggagtactattggcatggtggttccatattggattggttcattgttccgtgaacgtctgcatgtatggctgacaaagtggcctcagcagatagcactaataaaactcgcgggtgaaggaaattggttccagcagtttcgggttgtcgcgcttttcagaatctcaccattcccatatacaatttttaattatgccgtgactgtgacagaaattaagttcaacccttatctatgtggttctgttgctggaatggtacctgaggccttcatttatatctacagtgggcgtctaatacgtacattggctgacatgaagtacggcaactataaaatgacaccagtggaaatagcatacaacgccatttccttcgtcatcgctatcgccctcacggtcgccttctga

SEQ ID NO: 540 - protein, 275 aa, Zea mays
MPRSSAGASCTADDHSEQSRKDDEYERLVTRAQHATSDVGTTILSEQPKSRSFIWWMKVLLGCFLLILVGYVFVKWGVPFVFEKVLLPIMQWEASAFGRPVLAIVLVASLALFPVILVPSGPSMWLAGMIFGYGWGFLIIMAGSTIGMVVPYWIGSLFRERLHVWLTKWPQQIALIKLAGEGNWFQQFRVVALFRISPFPYTIFNYAVTVTEIKFNPYLCGSVAGMVPEAFIYIYSGRLIRTLADMKYGNYKMTPVEIAYNAISFVIAIALTVAF

SEQ ID NO: 541 - DNA, 1701 bp, Zea mays
  CDS (1)..(1701)
atggctccgcttctcgctgctgccatgaaccacgctgcagcccatcctggccttaggagccacctagtaggacccaacaatgagagtttctcacggcaccacctgccgtcttcttctccacagagcagcaagcgaaggtgtaaccttagctttactacacgatctgcaagagtaggcagccaaaatggagtccaaatgttgagcccctcggaaatcccacaaagggactggttcccctctgacttcaccttcggtgccgccacttcagcgtaccaaattgaaggtgcttggaatgaagatggaaagggggaaagcaactgggatcacttctgccacaatcatccggaaaggatactggacgggagcaattcagacattggagcgaattcgtaccatatgtacaaaacggacgtcagattgctcaaggaaatgggcatggacgcatataggttctctatctcttggcccagaatactgccgaagggaaccaaagaaggaggtattaacccggatggcatcaagtactacagaaacctcatcaacttgttgctggaaaacggcatagagccatatgtaacaattttccactgggatgtacctcaagcactagaagagaagtacggcggcttcctagataagagtcataagagcattgtagaagattacacctacttcgctaaggtgtgctttgataacttcggcgacaaggtgaagaattggttgacctttaatgagccccagacatttacttccttttcctacggaactggggtctttgccccagggcggtgctcacctggactagactgtgcctacccaactgggaattcactcgtcgagccttacactgctggccataacattctcctagcccacgctgaggctgttgatctttacaacaagcattacaagcgcgacgacacccgcatagggcttgcgtttgacgtaatgggtcgtgtgccatacggaacatcgtttctggataaacaggccgaagaaaggtcatgggacatcaacctaggatggttcttagagccagtggttcgtggtgactaccccttctccatgagatcattggctagggaacgactacccttcttcaaggacgagcagaaggagaagctcgccggttcctataacatgttggggttaaactactacacctcacggttctccaaaaacatcgacatctcaccaaactactcacctgtgctcaacactgacgacgcctacgccagtcaagaagttaacgggcctgacgggaagcccattggtcctcctatgggaaatccatggatctacatgtaccctgagggcttgaaggatctccttatgataatgaagaacaaatacggaaacccacctatctacatcaccgagaacggaatcggggatgttgataccaaagagacacctctacccatggaggctgccttaaatgactacaaaaggctagattacatccagcgccacatcgctactcttaaggaatcaatagacttgggatcaaatgtgcaaggctacttcgcttggtctctgctggacaactttgaatggtttgccggcttcaccgaacgttatggcattgtctacgtcgaccgcaacaataactgcacgcgctacatgaaggagtctgccaagtggttgaaagagttcaacaccgcgaaaaagcccagcaagaagattcttacgccagcttga

SEQ ID NO: 542 - protein, 566 aa, Zea mays; identical to SEQ ID NO: 132

SEQ ID NO: 543 - DNA, 1644 bp, Zea mays
  CDS (1)..(1644)
atgtctttctttctccccctcccctcccctcccctgcgggcttctctcacgagctcccccggcctcgccgccgccgcctgctccggcgggcgggacccagctcgcagcgtctcccctgcggcgaggtacacgatggagggagcgggaagagatgccaaccctttgagcggttacagaattggcaaaaccctgggaattgggtcgttcggtaaagtgaagatcgcggaacatatattgactggtcataaggtggcgatcaagatcctcaatcgccggaagatcagaagcatggaaatggaagagaaagtgaagagagaaatcaagatactgagattatttatgcatcctcatatcatacgcctttatgaggtgatagatacacctgctgatatttgtgttgttatggagtatgttaaatctggagagttgtttgattacatcgttgagaagggaaggctacacgaagaggaagcccggcacttttttcagcagatcatatctggtgttgaatattgccataggaacatggttgctcaccgtgatttaaagccagagaaccttcttttggattcaaaatgcaatgttaagattgccgattttggcttaagtaatattatgcgtgatggtcactttcttaagacgagttgtggtagcccgaattatgcagcacctgaggtcatatctggtaaactatatgctggtcctgaagttgatgtctggagctgtggagttattctttatgctcttctttgtggcactctcccatttgacgatgagaatattccaaacctttttaagaaaataaagggtggaatatatacccttcctagtcatttgtcaccttcagcgagggacttgattcccagaatgctggttgttgatccaatgaaaaggattacaatacgtgaaatccgtgaacatgtgtggttcaagatccaacttccgcgctatttggctgtaccgcctccagacactgctcaacaagttaaaaagctggacgaggaaactcttaatgatgttattaagatgggttttgacaagaatcagctaattgaatctctgcaaaacagattgcagaatgaggcaacagttgcctattatttactcttggacaataggcttcgtacaaccagtggttatcttggatctgagtttcaagaatctatggactcatctttctctcaagtaatcgctgaaacaccaacttcagcaactgaacttcggcagcatgtgtttacagaatctccaggttctggcttgaggcagcattttgcagctgaaaggaaatgggcccttggtcttcagtctcgagcacatccacgagaaataataagtgaagtgcttaaagctctgcaagaactgaatgtttactggaaaaagattggacactacaacatgaaatgcagatggagtcctggctgccttgagagtatgatgcataactgtgatggctttagtgcagagtctgctataattgaaactgatgatctcatagcgaaatcaacccgtatagtgaagtttgagattcagctttacaaaacgagggatgagaagtaccttcttgacctgcaaagggtcagtggaccacaactcctctttctggacttgtgttccgcctttctaacgcagctgagagttctttga

SEQ ID NO: 544 - protein, 547 aa, Zea mays
MSFFLPLPSPPLRASLTSSPGLAAAACSGGRDPARSVSPAARYTMEGAGRDANPLSGYRIGKTLGIGSFGKVKIAEHILTGHKVAIKILNRRKIRSMEMEEKVKREIKILRLFMHPHIIRLYEVIDTPADICVVMEYVKSGELFDYIVEKGRLHEEEARHFFQQIISGVEYCHRNMVAHRDLKPENLLLDSKCNVKIADFGLSNIMRDGHFLKTSCGSPNYAAPEVISGKLYAGPEVDVWSCGVILYALLCGTLPFDDENIPNLFKKIKGGIYTLPSHLSPSARDLIPRMLVVDPMKRITIREIREHVWFKIQLPRYLAVPPPDTAQQVKKLDEETLNDVIKMGFDKNQLIESLQNRLQNEATVAYYLLLDNRLRTTSGYLGSEFQESMDSSFSQVIAETPTSATELRQHVFTESPGSGLRQHFAAERKWALGLQSRAHPREIISEVLKALQELNVYWKKIGHYNMKCRWSPGCLESMMHNCDGFSAESAIIETDDLIAKSTRIVKFEIQLYKTRDEKYLLDLQRVSGPQLLFLDLCSAFLTQLRVL

SEQ ID NO: 545 - DNA, 618 bp, Zea mays
  CDS (1)..(618)
atggcacgactcggcactgcgcccgcagcggcggcggcgtccacgcctgccagcgacagcacgttcctccgcttgaataatctcgacatcaacggcgacgacgcgccgtcgtcgcaggctcccacgagcaagaagaaaaggagaggcacacgggcagtgggtcctgataaaggaaaccggggactgcgccagtttagtatgaaagtttgtgagaaagttgaaagtaaagggagaacaacatataatgaggtggcagatgaacttgttgctgagtttacagaccccaataataatattgaggcaccagaccctgataaccctaatgcgcaacaatatgatgaaaaaaatattcgacgaagagtttatgatgctttaaatgttctgatggctatggacattatatctaaagataaaaaggagatccaggggaagggcttgccgcggactagtataagtgatattgaagaattgaagactgagcttgtgggactgaaaggtagaattgagaagaaaagtgtttacttacaggagctacaagatcaatatgtaggtttgcaaaacctgattcaacgaaatgagcaattatatggttcaggaaacacaccttctggtggatga

SEQ ID NO: 546 - protein, 205 aa, Zea mays
MARLGTAPAAAAASTPASDSTFLRLNNLDINGDDAPSSQAPTSKKKRRGTRAVGPDKGNRGLRQFSMKVCEKVESKGRTTYNEVADELVAEFTDPNNNIEAPDPDNPNAQQYDEKNIRRRVYDALNVLMAMDIISKDKKEIQGKGLPRTSISDIEELKTELVGLKGRIEKKSVYLQELQDQYVGLQNLIQRNEQLYGSGNTPSGG

SEQ ID NO: 547 - DNA, 1047 bp, Zea mays
  CDS (1)..(1047)
atgggcaacgtgagcggcggtacggcacaaggccacgacaggccaaaagagaggagacggagcaatggaattggaaggccacgagaggagtctgagctcgccgctttagcgagcgcaagcagagcctgccaaaaggctagagaaaaaaaaatccgccttctcctcccagtcgcaggccaggctcagcctcccctctcccctcctcggcatcttcgccgccggcgatctatctctctcacaatggcggcgcccatgtcagccatcgactcagcgtggcagctcctgatcgccaacttcaccgagttccagctcgccaccgtcgtcaccttcctgctccacgagaccgtcttcttcctctccggcctcccctccctcctcttcgagcgcttcggactcttcgccaagtacaagatccagaagaagagcaacacctctgcttaccaaaacagatgtgtcttgcgcctcattctctaccatgtatgtgtgaacctgcctgtcatgattttctcgtatcctgccttcaaattcatgggtctcaggagctctcttcctttgccacattggtcggttgttgtatctcaagttcttttctactttgtccttgaggattttatattctattgggggcacagggcattgcatacgaaatggctatacaaacacgttcacagcgtccaccatgagtacgccacaccctttggtttaacatcggaatatgcccacccagctgaaattttgttcctgggattcgccacagttgttggtcctgctcttactggccctcatctcttcaccctgtggctgtggatggtgttgagggttttggagacagttgaagctcacagcggctatcacttcccatggagcccatcaaatttcctgccgctgtatggcggctcggacttccatgactaccatcaccgtgtgctgtacacaaagtcagggaactatgcctcaacatttgtttacatggactggttgttcggcacggacaaggattatcgcaaggcaaagaccattgaggagaaagaagggaaaaatctgtga

SEQ ID NO: 548 - protein, 348 aa, Zea mays; identical to SEQ ID NO: 506

SEQ ID NO: 549 - DNA, 795 bp, Zea mays
  CDS (1)..(795)
atgtcagccatcgactcagcgtggcagctcctgatcgccaacttcaccgagttccagctcgccaccgtcgtcaccttcctgctccacgagaccgtcttcttcctctccggcctcccctccctcctcttcgagcgcttcggactcttcgccaagtacaagatccagaagaagagcaacacctctgcttaccaaaacagatgtgtcttgcgcctcattctctaccatgtatgtgtgaacctgcctgtcatgattttctcgtatcctgccttcaaattcatgggtctcaggagctctcttcctttgccacattggtcggttgttgtatctcaagttcttttctactttgtccttgaggattttatattctattgggggcacagggcattgcatacgaaatggctatacaaacacgttcacagcgtccaccacgagtacgccacaccctttggtttaacatcggaatatgcccacccagctgaaattttgttcctgggattcgccacagttgttggtcctgctcttactggccctcatctcttcaccctgtggctgtggatggtgttgagggttttggagacagttgaagctcacagcggctatcacttcccatggagcccatcaaatttcctgccgctgtatggcggctcggacttccatgactaccatcaccgtgtgctgtacacaaagtcagggaactatgcctcaacatttgtttacatggactggttgttcggcacggacaaggattatcgcaaggcaaagaccattgaggagaaagaagggaaaaatctgtga

SEQ ID NO: 550 - protein, 264 aa, Zea mays
MSAIDSAWQLLIANFTEFQLATVVTFLLHETVFFLSGLPSLLFERFGLFAKYKIQKKSNTSAYQNRCVLRLILYHVCVNLPVMIFSYPAFKFMGLRSSLPLPHWSVVVSQVLFYFVLEDFIFYWGHRALHTKWLYKHVHSVHHEYATPFGLTSEYAHPAEILFLGFATVVGPALTGPHLFTLWLWMVLRVLETVEAHSGYHFPWSPSNFLPLYGGSDFHDYHHRVLYTKSGNYASTFVYMDWLFGTDKDYRKAKTIEEKEGKNL

SEQ ID NO: 551 - DNA, 498 bp, Glycine max
  CDS (1)..(498)
atgcacccacatccatctggccttagccctcatgtacccctccaagaatacattgaaaatatgaggaagatcgttatccatcttaagagcctttcaaagaagactcgcataatatttctcagttcccctcccatcaatgaggtgcaaatgcatgaaactctcagtgatctattggggccactaaaaaggacaaatgaagcttgtcgaatatactcagaagcgtgtttggagctgtgccgtgagatgaatgtgaaggccattgatctctggtctgcactccagcaaaggcatgactggttagatgtttgcttcacggatggaattcatttgtcaaatgagggaagcaagatagtggcaaaagagatattgaaggtcctcggggaagcagactgggaacctagtctgcactggaattcaatgccaattgagtttgcagaagattcactatatgaaccaatcagtgcggatgaaaacactcctatagatgtctctaactag

SEQ ID NO: 552 - protein, 165 aa, Glycine max
MHPHPSGLSPHVPLQEYIENMRKIVIHLKSLSKKTRIIFLSSPPINEVQMHETLSDLLGPLKRTNEACRIYSEACLELCREMNVKAIDLWSALQQRHDWLDVCFTDGIHLSNEGSKIVAKEILKVLGEADWEPSLHWNSMPIEFAEDSLYEPISADENTPIDVSN

SEQ ID NO: 553 - DNA, 876 bp, Brassica napus
  CDS (1)..(876)
atggttgaagtagaaagagtcgagaatttagcaaagagcggaatcaaatcgatcccaaaagaatacatccgtccaaaagaagagctggagagcatcaacgacgttttccaagaagagaagaaagaagacggccctcaagtccccaccatcgacttacaaaacatcgagtcagaagatgaaacgctccgtgagcaatgcatagaggagctcaagacggctgctatggactggggagtgatgcatctggtcaaccacggcgtaccggttgacctgatggagcgtgtgaagaaagcaggagaagagttcttcggtttacccgtggaggagaaggagaagtacgcaaacgatcaagccacaggaaagatccaagggtatggaagtaaattagctaacaacgcgagtggacagctagagtgggaagactacttcttccatcttgtttatcctgaagacaagagagatctctcactttggcccaagacaccaagtgattacattgaagcgacgagtgagtacgcaaagtgtcttcgtttgctagcaacaaaagtcttcaaggctctctctgtcggtctcggcttagagtatgaccgtctagagaaagaagttggcggtttagaagagcttctcctccaaatgaagataaactattacccgaaatgccctcagcctgagctagcacttggcgtggaagctcacaccgatgtaagcgctttgaccttcattctacacaacatggttccggggttgcagcttttctacgagggcaaatgggtcatcgcaaaatgtgttcctgattccattgtgatgcacattggagatacgttggagattcttagtaatggcaagttaagagtatacttcaccgtgggttggtga

SEQ ID NO: 554 - protein, 291 aa, Brassica napus
MVEVERVENLAKSGIKSIPKEYIRPKEELESINDVFQEEKKEDGPQVPTIDLQNIESEDETLREQCIEELKTAAMDWGVMHLVNHGVPVDLMERVKKAGEEFFGLPVEEKEKYANDQATGKIQGYGSKLANNASGQLEWEDYFFHLVYPEDKRDLSLWPKTPSDYIEATSEYAKCLRLLATKVFKALSVGLGLEYDRLEKEVGGLEELLLQMKINYYPKCPQPELALGVEAHTDVSALTFILHNMVPGLQLFYEGKWVIAKCVPDSIVMHIGDTLEILSNGKLRVYFTVGW

SEQ ID NO: 555 - DNA, 1626 bp, Brassica napus
  CDS (1)..(1626)
atgggcatagagagatgccaagagtctacaagtggggaatcgtttctgtatagataccaacttgaagaggatgtaaaaagattgcaactacaactacaagaagaaatagagctgcacacttttctagaaagcgtcatggagaaagatccttggcagctatcttcttcttcttgtagtgttccacatcaagctcaagaactgctttccaatatatccaccctagagactgcagtcaccaagctagagcaagaaatgatgtctctgaacttccaacttagccaagaaagaaacgagagaagactagctgaatatcatttgacacactcagcttctccaccaaacatttcttcttccttgatatatttgaatcattcggattctgaactacatcgatcagcagaagacagttcatgccaaaaccaagacccttcatctgaatcatctcaggcagaatcaactgttaagaagagtaaccaaattcttgagaagagactaatgagaaagacaaatgggaggaagctacttaagtacctgtgggatcaccctaatctactctctgaagaaatggtgagatgtatgaagaacatcttcatgtctcttgctgatcagacaaaagcatcctcaaacgagagccaactcctctcaccggtggcatcaccaagggggcatctatcaagctcatcatcctggtggccttcaacagaacggtcaaaaatctcttcatgggtgcaaagccctcagatagatatccaaagtaacaataatgtcttggccgccacaggaaacgtctttgatccttacaaagttcgtgggaagttaagctgggccgagattggaaactacggtttggcgtccgaggtttcttggatgtctgttgggaagaaacagcttgaatatgcttctggtgcattgagaaggttcaggacactggtggagcagcttgctagagtaaacccaatccatttgagctgtgatgagaagctagctttctggattaacgtttataacgctttgatcatgcatgcgtacttggcttatggtgtgccaaaaagtgacttgaagctcttctcgttgatgcaaaaggctgcctatacggttggaggacactcatatactgcagctgcaatggagtatgttatactaaagatgaaaccgcctacgcacaggccacaaattgctctgcttcttgccatcaacaaggtgaaagtatcagaagagcaacgtaaggcaagcattgatagacatgagcctcttctctcctttgccttaagctgcggaatgtactcttcccctgcggtgaggatctacacagcgaaaagagtgaaggaagagctacaagaagctcaaagggagttcatacaagcatcggtagggctgagcagcaaagggaagctcttggtacccaaaatgctccactgttacgcaaagagtttggtggaggattcgaacttgggggtctggatatcgaagtaccttccaccacatcaagcagcttttgtggaacagtgcatctctcagagaagaagacaaagtcttctctcctcacgtaactgtggaatactcccctttgactctcgtttcagatatctgtttctacctgacaacaacaacaactcctgtgtgtaa

SEQ ID NO: 556 - protein, 541 aa, Brassica napus
MGIERCQESTSGESFLYRYQLEEDVKRLQLQLQEEIELHTFLESVMEKDPWQLSSSSCSVPHQAQELLSNISTLETAVTKLEQEMMSLNFQLSQERNERRLAEYHLTHSASPPNISSSLIYLNHSDSELHRSAEDSSCQNQDPSSESSQAESTVKKSNQILEKRLMRKTNGRKLLKYLWDHPNLLSEEMVRCMKNIFMSLADQTKASSNESQLLSPVASPRGHLSSSSSWWPSTERSKISSWVQSPQIDIQSNNNVLAATGNVFDPYKVRGKLSWAEIGNYGLASEVSWMSVGKKQLEYASGALRRFRTLVEQLARVNPIHLSCDEKLAFWINVYNALIMHAYLAYGVPKSDLKLFSLMQKAAYTVGGHSYTAAAMEYVILKMKPPTHRPQIALLLAINKVKVSEEQRKASIDRHEPLLSFALSCGMYSSPAVRIYTAKRVKEELQEAQREFIQASVGLSSKGKLLVPKMLHCYAKSLVEDSNLGVWISKYLPPHQAAFVEQCISQRRRQSLLSSRNCGILPFDSRFRYLFLPDNNNNSCV

SEQ ID NO: 557 - DNA, 1227 bp, Brassica napus
  CDS (1)..(1227)
atgaggtattattctacagctccttcttcttcgtgccgtgagccatcatcgtctccatcgttctcatcgcttccagatgaaatcgctgcgaattgtttagcccgcgtctcgaaatcccaataccgttcaatcagctcagtctccaagggcttccactctctcctctcttctccggagatatacgcagctcgatctcaaatcggagccacagagcctcgcctctatttgtgttgtgaaagcttaaggacggccacccgttgttacagctggtacaatctcatgagtctcgatgatgatataaccaaaaaaggagacgcctttatcagcgtagacggggctgaaattgaaatgaagactgaattgaggttagtacctgttaaagactcttcctttcaattacgtgctcgatcaaaagaggcaaatttagctgttggttccgagatctaccaaatcggcggaatcaacaagcagggcaagcgatctcgatccgtctgtgtgcttgattgtcggagtcacactcaacgtcgtgctcctaggatgagggttgcaagagaatgcgccaaagcttgtcttttagacgggagtatatatgtaatgggaggaaccagaaagtgtgagagttggggtgaagttttcgacttaaagtctcagacttggaagaaagagctacttcctagccctaccggtgatgggtttgattgtaaattccaactccttgtccttggggcaaagatatacgttatcaccgagcataacaacaagtatgcttatgatcctaaacaaggaagatggttgctgctagagatgggttttacgggtctagaatggatactagaaacatgtggggtttggtgcgttctagataatctagtgtttaaggagttcagcgatgatttgttctggtatgacgtgagttgtgaaaagtgggtaattgttgagggtttggaagctctgtgcgataccaagttttgttgttgttaccgtatgattcaattagttaactatggtgggaaactggtgattgtatggctagtgacacctcaacctgtattaaggaggaataagccgcctgtcattccagaagagaaaacttgctttgcagttattaggttggagaagcgtctgacttcttctggacttgctatttcgggagagattgagcggttgagcttctctcttgttcacggctcatatactcccttgacatgcctatccgtcttgctttga

SEQ ID NO: 558 - protein, 408 aa, Brassica napus
MRYYSTAPSSSCREPSSSPSFSSLPDEIAANCLARVSKSQYRSISSVSKGFHSLLSSPEIYAARSQIGATEPRLYLCCESLRTATRCYSWYNLMSLDDDITKKGDAFISVDGAEIEMKTELRLVPVKDSSFQLRARSKEANLAVGSEIYQIGGINKQGKRSRSVCVLDCRSHTQRRAPRMRVARECAKACLLDGSIYVMGGTRKCESWGEVFDLKSQTWKKELLPSPTGDGFDCKFQLLVLGAKIYVITEHNNKYAYDPKQGRWLLLEMGFTGLEWILETCGVWCVLDNLVFKEFSDDLFWYDVSCEKWVIVEGLEALCDTKFCCCYRMIQLVNYGGKLVIVWLVTPQPVLRRNKPPVIPEEKTCFAVIRLEKRLTSSGLAISGEIERLSFSLVHGSYTPLTCLSVLL

SEQ ID NO: 559 - DNA, 1002 bp, Glycine max
  CDS (1)..(1002)
atggctgcaataagttctctctctttgttcttcaaactaaagttttcgttgattttaatttcatgtgttatcggggtaacttcagctcagttatcctcaaaattctatgataaaagttgtcccaaagcccttaccaccattaggaaagaagtggaacgtgctgtgcgcaatgagagtcgcatgggggcctccttgctccgactacacttccatgactgcttcgttcaaggatgtgatgcatcggtgttgttagacgacacggcaaatttcactggcgagaagaactcatttcctaatgctaactcccttaggggttttgaagtcatagacaacataaaatctaagttggaaggcatgtgtaaaggtgttgtctcttgtgctgacatcttagccgttgctgcgagagacgctgttgttgctcttggtggacaaaaatgggaagtacaagtaggcagaagagattcaaccacagcaagtttagacgaagccaattcagatttaccagctccctttttggatcttagtggcctcatcactgctttcgccaagaaaaatttcactacccaagaacttgttactttatcaggtggtcacacaatcggactagttagatgccgtttcttcagagcgaggatttacaacgagagcaacatagatccgacatttgcacaacaaatgcaagcattgtgtcccttcgaaggtggtgatgacaatttgtctcctttcgattccaccacaccattcaaatttgacaatgcattctacaagaacttggtgcagctaaagggtgtagtacactcggaccaacaactcttcacgaacaatggatctggtcccacaaacgatcaagtaaatagatacagcagaaacatgggaaatttcaagaaggactttgcagatgcaatgtttaagatgagcatgctcaccccactaactggctccaacggtcagattaggcaaaactgcaggctagtcaatccaccatcaaccactgtctcctga

SEQ ID NO: 560 - protein, 333 aa, Glycine max
MAAISSLSLFFKLKFSLILISCVIGVTSAQLSSKFYDKSCPKALTTIRKEVERAVRNESRMGASLLRLHFHDCFVQGCDASVLLDDTANFTGEKNSFPNANSLRGFEVIDNIKSKLEGMCKGVVSCADILAVAARDAVVALGGQKWEVQVGRRDSTTASLDEANSDLPAPFLDLSGLITAFAKKNFTTQELVTLSGGHTIGLVRCRFFRARIYNESNIDPTFAQQMQALCPFEGGDDNLSPFDSTTPFKFDNAFYKNLVQLKGVVHSDQQLFTNNGSGPTNDQVNRYSRNMGNFKKDFADAMFKMSMLTPLTGSNGQIRQNCRLVNPPSTTVS

SEQ ID NO: 561 - DNA, 1137 bp, Oryza sativa
  CDS (1)..(1137)
atggcgtcttgctgggagcagctgcagggcctctgcgccgccggccacttgcgtcgccgctgccgcggtagaagcttggtcctgctgcagcagctgcagctgctgggggttttggtggtggtggtggccggggttgcaccaggcatcagtgaggcacaggtgaggagccggttcaaggcgatcttcatgttcggcgactcgatcgtggatccagggaacaacaacgggcaactaacggaggcgagagccgacttcccgccgtacgggcaggatttccccggcggggtcgccaccggcagattctccaacggcaaggtccccggtgacttgatagcttctaagttgggcattaaagagctattgccagcttacaaagatcaggaccttgaactaaatgacctacttactggtgtggcctttgcctcaggaggcagtggatatgatcccctcacttctatatcgactgccatatcgagttcaggacaactcaatttattcagtgactacaagcagaagcttacatctttgatcggagaggaggcaatgacacgtattctctcagaagcagttttctttactgtcatgggagcaaatgacttgctcaacaattattttacgcttcctgtgaggcggcatcaatatgacattcctggctacgtggactttgttgtctctaacgcagttaactttactctgacaatgaatgagatgggtgctaagatgattgggttcgttggtgttccaccacttggttgttgtccctcacagagaactggtccatcaagagaatgcgaaccattacgaaatcaagcatcagaattatttaatactagaatgaagcaggaaatcgatcgactaaatgtcgaacataatattgatggtttaagggttgtttattttgacatatactacaatttgctcgacctgatccacaatcctggttattatggtttcaaggatacatctgatggatgctgcggcaacacagtgctaaatgctgctatattcattaaatatcacagtgcatgtccaaatgtttatgattatattttctgggatagcttccatcctaccgaaaaggcatacgacatagtggttgataagcttatccaggaaaataagcagtatctgatgtaa

SEQ ID NO: 562 - protein, 378 aa, Oryza sativa
MASCWEQLQGLCAAGHLRRRCRGRSLVLLQQLQLLGVLVVVVAGVAPGISEAQVRSRFKAIFMFGDSIVDPGNNNGQLTEARADFPPYGQDFPGGVATGRFSNGKVPGDLIASKLGIKELLPAYKDQDLELNDLLTGVAFASGGSGYDPLTSISTAISSSGQLNLFSDYKQKLTSLIGEEAMTRILSEAVFFTVMGANDLLNNYFTLPVRRHQYDIPGYVDFVVSNAVNFTLTMNEMGAKMIGFVGVPPLGCCPSQRTGPSRECEPLRNQASELFNTRMKQEIDRLNVEHNIDGLRVVYFDIYYNLLDLIHNPGYYGFKDTSDGCCGNTVLNAAIFIKYHSACPNVYDYIFWDSFHPTEKAYDIVVDKLIQENKQYLM

SEQ ID NO: 563 - DNA, 1056 bp, Brassica napus
  CDS (1)..(1056)
atgtctgtggagagatctttcgaagcgtgggaagaggttcagcgacacgggcaagacttagccgaccgtctcgctcagggcttcactggcttgattcaaatcaaccctccttcgtttccgtggccgagtcatcagaaactgaagctcttcgatctcgagttctctcctcagcagttctcgaaccagcccatcaatggcggcgtggaggctattctcgacatcgggaacaagattggtcagattggtcaggctggtgttgattttggctccgggttgaacgtgatggttcatcagttctttaggaggctgcccttgccgtttagacacgaggataacgtgtctgtttctatgagacatggagtttatgtagagacaaaagatgagtcgaggctttctaagacagatgctgtctcctctgctgctatgtctgaggagagagtgacagagtttgatttgagtaatgctgggttacttaggaggccaaagggaacggttgagttttcgacaagttatgaaagtagaacaagtggtatggaacattcgttagcagccaggggagatctttggagagtagaagcttcttcatcgagttcagctgcaagagatgacagttcttctctctttcttctccagcttggaccgctgctgtttcttcgcgattcgacccttcttttacccgttcatttatcaaagcagcacttgctctggtatggatatgatagaaagaaaggtatgcattcgctttgtccagctttgtggtcaaagcatagaagatggcttatgatgtcaatgatctgcctcaatcctttagcttgctcatttgtagatttgcagttcccaaatgggcaactaacgtatgtctctggtgagggattaacaacaagtgtctttgttcctttgtgtggtggtcttcttcaagcgcaaggtcaatatccaggagatatgaggtttagattctcttgcaagactaaacaaggaacaagaatcacaccaatggtgaactggcctgacaaatcgtatggagtaggtgtttctcaagcctttggcttggcgtaa

SEQ ID NO: 564 - protein, 351 aa, Brassica napus
MSVERSFEAWEEVQRHGQDLADRLAQGFTGLIQINPPSFPWPSHQKLKLFDLEFSPQQFSNQPINGGVEAILDIGNKIGQIGQAGVDFGSGLNVMVHQFFRRLPLPFRHEDNVSVSMRHGVYVETKDESRLSKTDAVSSAAMSEERVTEFDLSNAGLLRRPKGTVEFSTSYESRTSGMEHSLAARGDLWRVEASSSSSAARDDSSSLFLLQLGPLLFLRDSTLLLPVHLSKQHLLWYGYDRKKGMHSLCPALWSKHRRWLMMSMICLNPLACSFVDLQFPNGQLTYVSGEGLTTSVFVPLCGGLLQAQGQYPGDMRFRFSCKTKQGTRITPMVNWPDKSYGVGVSQAFGLA

SEQ ID NO: 565 - DNA, 1107 bp, Zea mays
  CDS (1)..(1107)
atggctgccgtgaccgcggcggccgtctctctgccctcctcctcctcctcccctgccgccgccaaggccaaggcgtccgcgtccgcgtccccgtcgtctccatgcggccacctccagttcccgcggcggcacggcggcccgcgcgcggtgcggctgcgcgtgcaggtgtccaccaccgagaccgcggaggcggagccggtcaagaagctggagaaggtgtccaagaagcaggaggaggggctcgtcaccaacaagtacaagcccaaggagccgtacgtcgggaggtgcctgctcaacaccaggatcaccggcgaccaagcgcccggggagacgtggcacatggtcttcagcacagaaggcgaggtcccctacagagagggccagtccatcggcgtcatcgcggatggcgaggacaagaacggcaagccgcacaagctcaggctctactccatcgccagcagcgccctcggagatttcggcgactccaagacggtgtcgctgtgcgtgaagaggctggtctacaccaacgatcagggggaggtcgtcaaaggagtctgctcgaacttcctctgtgacttgaagccaggcgctgaggtgaagatcacagggccagtgggcaaggagatgctcatgcccaaagaccccaacgcaacaatcatcatgctcgcaacgggtaccggcatcgctccgttccgctccttcttgtggaagatgttcttcgaggagcacgaggactacaagtacaccgggctggcgtggctgttcctgggcgtcccgaccagcgacaccctgctgtacaaggaggagctggagaagatgaaggagatggcgccggacaacttccggctggacttcgcggtgagccgggagcagacgaacgcggccggggagaagatgtacatccagacgcgcatggcggagtacaaggaggagctgtgggagctgctcaagaaggacaacacctacgtctacatgtgcgggctcaagggcatggagaagggcatcgacgacatcatgctcgacctcgcagccaaggacgggatcaactggttggactacaagaagcagctcaagaagagcgagcaatggaacgtcgaagtctactga

SEQ ID NO: 566 - protein, 368 aa, Zea mays
MAAVTAAAVSLPSSSSSPAAAKAKASASASPSSPCGHLQFPRRHGGPRAVRLRVQVSTTETAEAEPVKKLEKVSKKQEEGLVTNKYKPKEPYVGRCLLNTRITGDQAPGETWHMVFSTEGEVPYREGQSIGVIADGEDKNGKPHKLRLYSIASSALGDFGDSKTVSLCVKRLVYTNDQGEVVKGVCSNFLCDLKPGAEVKITGPVGKEMLMPKDPNATIIMLATGTGIAPFRSFLWKMFFEEHEDYKYTGLAWLFLGVPTSDTLLYKEELEKMKEMAPDNFRLDFAVSREQTNAAGEKMYIQTRMAEYKEELWELLKKDNTYVYMCGLKGMEKGIDDIMLDLAAKDGINWLDYKKQLKKSEQWNVEVY

SEQ ID NO: 567 - DNA, 867 bp, Oryza sativa
  CDS (1)..(867)
atgccgcggcggctgcctccgccgcgcccggcctggccaacctgctcattcgcgaaggcgccggcctcccttcgcgtcccgaacggtacccgccattccggccctgtacttctgattcctttgctccaatctctagggaaggggacgatattcccccccaaaaaaaaatcggtttctttacgcagcggcggcggcggcaatgcggcagagagggaggagggcggtgcgaacaggaacgggaagaaggagaagaccggggcgcagaggatcaccgggtgggggctccgtgagttcagcaagatagtttctaagaaagttgaggccaaaggaagaaccacatataatgaggttgccgatgagatttttgcggagctgaagtccattacgcagaacggtctggagtttgatgagaagaatattaggcggagggtatatgatgctttcaatgtgctcattgcaattcgtgttattgcaaaagataaaaaggagataaagtggatgggccttactaattatagatacgaaaagatacagaagttggaggaagttcacaaagaactcatcaccaggatcaagaataagaagaagcttctccaggaaattgaaaagcagtttgatgaccttcagaatattacattacgcaaccaggctagtcagaggccagcagaaagtgttaatggcatcctccttccgttcttattgatcaagacatcccgaaaagcaagggtggaaattgagatttcggaagattcgaagtttgcacggttcgacttcaacggtgcaccattcaccatgcatgatgatgtatcaatccttgaagccatcaggcgtaacaaaggaagagctggcctctccattcacccttaa

SEQ ID NO: 568 - protein, 288 aa, Oryza sativa
MPRRLPPPRPAWPTCSFAKAPASLRVPNGTRHSGPVLLIPLLQSLGKGTIFPPKKKSVSLRSGGGGNAAEREEGGANRNGKKEKTGAQRITGWGLREFSKIVSKKVEAKGRTTYNEVADEIFAELKSITQNGLEFDEKNIRRRVYDAFNVLIAIRVIAKDKKEIKWMGLTNYRYEKIQKLEEVHKELITRIKNKKKLLQEIEKQFDDLQNITLRNQASQRPAESVNGILLPFLLIKTSRKARVEIEISEDSKFARFDFNGAPFTMHDDVSILEAIRRNKGRAGLSIHP

SEQ ID NO: 569 - DNA, 963 bp, Glycine max
  CDS (1)..(963)
atgatgacacaagaatcatcagaggtgttgggaaaacatgcaagctcaggttctcatgtgagggggagtagtgaatatattagactggtcatatccgatgaacaaagggtggttgaagctgaaaccttgctgactcgagcagaatcaagaatcaagtctttctggtggtggatgaaatcctttttatggtgtgttgtctttgtgatacttgtttttattcttgtcaaatggggagtgccacttttttttgtaaaggttctttacccaatcatggaatgggaagctactgcctttggccgtccagttcttgctttagtacttgttgcctctctggctttattcccagtgttcttaatcccttctggcccctccatgtggctggctgggatgatttttggttatggccttggcttctttataataatggttggaacaaccattgggatggtcctgccttacttaattgggctactgttccgtgaccgcattcatcaatggttaaagagatggccccaaaatgctgcaatgattaggcttgctggggaggggaactggtctcgtcaatttcaagtggttgcactgttcagggtttctccttttccctatactatattcaattatgccgtggtagtcacaaatatgaggttttggccctacttatgtggatcagtagctggaatggtaccagaagctttcatctatatctacagtggtcggttaataaagacattggcagacgcacagtatgggaagcaccacttgactactgtggaaatcgtatacaacattatttctttcattattgcaatagttaccactattgccttcactgtctatgccaaaaggactctaaatcaactcaaaatggcagagttgaatgatgaagttacctttgtttctgtagagatggagaagcttccccttgaaaggcctaaacagcttagtttgtcaaaattttcgtga

SEQ ID NO: 570 - protein, 320 aa, Glycine max
MMTQESSEVLGKHASSGSHVRGSSEYIRLVISDEQRVVEAETLLTRAESRIKSFWWWMKSFLWCVVFVILVFILVKWGVPLFFVKVLYPIMEWEATAFGRPVLALVLVASLALFPVFLIPSGPSMWLAGMIFGYGLGFFIIMVGTTIGMVLPYLIGLLFRDRIHQWLKRWPQNAAMIRLAGEGNWSRQFQVVALFRVSPFPYTIFNYAVVVTNMRFWPYLCGSVAGMVPEAFIYIYSGRLIKTLADAQYGKHHLTTVEIVYNIISFIIAIVTTIAFTVYAKRTLNQLKMAELNDEVTFVSVEMEKLPLERPKQLSLSKFS

SEQ ID NO: 571 - DNA, 1746 bp, Brassica napus
  CDS (1)..(1746)
atgaactcaatgtcttcatctcttcagagaaccggtcaatgggttttctcacaagatattccgacagatgttgtagttgaagtcggagaagctaatttctctcctcataagttcatgctagtggcgaagagcaactacataaggaagctaataatggaatccaaagacagtgacgtgacgagaatagatctctcggatatccccggaggtcctgagatgttcgagaaagctgccaaattctgttacggtgtgaacttcgagattaccgtccagaacgtggcggcccttcattgtgccgctgagtttcttcagatgacggataagtactgcgacaacaacctagccggtcggacacaagatttcctttctcaggttgccttgtctagcctctctggagcggtagttgtcctcaagtcctgcgagattctccttcctatttctcgtgatcttggtattgtccgccgttgtgtggacgtcgttggtgctaaggcttgcaacgaggcaatgtttccgtgtcgaacaccaccaaactggtggacagaggagctctgtatcttagacgttgacttcttcaccgacgtcgtagcttccatgaagcagagaggcctcaaaccttcttctttagcctctgcaatcatcacctacaccgagagatcattacgcgatctcgtcagagaccattccggcagaggagtcaagttttccgaccccgaaaacaacgactccgaggagagatctcaacagagagatctcgtggaatccatcgtctctctattaccttccgacaagggacttttccctatcaacttcctctgttctctactccgttgcgccgtcttcttggaggcttcactcgcctccaagaacgagctggagaaacgaatctccgtcgttcttgaacacgtcaccgttgacgatctcttgatcccgtctttcacctacgacggtgaaagactattagacctcgacagcgtcagaagaatcatctctaccttcgtcgagaaggagaagaatgtcggagttttcaacggcggagacttcaacaaaggattattctcagcgtcgctacaaagagtagcgaggaccgttgactcttacttagcagagatcgctacctacggagagctaacgatctccaagttcaacgctatcgcgaatctcgtcccgaagtctgcaagaaagtcagacgacgatctttacagagcgatagacatcttcttgaaagctcatcctaacctagacgagatcgagagagagaaagtttgtagctcaatggaccctctcaagctttcttacgaggcacgtctccacgcttcgcagaacaagagactaccagtaaacatcgttctccacgcgctttactacgaccagctaaagctgagaagcggagtcgaagataaagaaggagcagtggttgtactccctgaggctgtagccacgcgtggacaggtcaaagctgatgcttcgttggctaaagagaacgaagccttgaggagtgagctgatgaagatgaagatgtacgtttcggatctgcagaagagtggtggggcagctggagcttcttcttcgaatgcaccaccgagcaataagaagagcagcaaaagtactttcttctcgtcggtttcgaagaagctggggaagttgaatccgtttagacatgggtctaaggatacttcgaacattgatgaggatcttgctggtgttgatatcactaagccaagaagacgaagattctctatctcttaa

SEQ ID NO: 572 - protein, 581 aa, Brassica napus
MNSMSSSLQRTGQWVFSQDIPTDVVVEVGEANFSPHKFMLVAKSNYIRKLIMESKDSDVTRIDLSDIPGGPEMFEKAAKFCYGVNFEITVQNVAALHCAAEFLQMTDKYCDNNLAGRTQDFLSQVALSSLSGAVVVLKSCEILLPISRDLGIVRRCVDVVGAKACNEAMFPCRTPPNWWTEELCILDVDFFTDVVASMKQRGLKPSSLASAIITYTERSLRDLVRDHSGRGVKFSDPENNDSEERSQQRDLVESIVSLLPSDKGLFPINFLCSLLRCAVFLEASLASKNELEKRISVVLEHVTVDDLLIPSFTYDGERLLDLDSVRRIISTFVEKEKNVGVFNGGDFNKGLFSASLQRVARTVDSYLAEIATYGELTISKFNAIANLVPKSARKSDDDLYRAIDIFLKAHPNLDEIEREKVCSSMDPLKLSYEARLHASQNKRLPVNIVLHALYYDQLKLRSGVEDKEGAVVVLPEAVATRGQVKADASLAKENEALRSELMKMKMYVSDLQKSGGAAGASSSNAPPSNKKSSKSTFFSSVSKKLGKLNPFRHGSKDTSNIDEDLAGVDITKPRRRRFSIS

SEQ ID NO: 573 - DNA, 1554 bp, Oryza sativa
  CDS (1)..(1554)
atggagaggcgtcctctgcatctgcatctcctcctcttcttctcggcatggctactgctgctgctgctgcaaggtgtaagctcgctacagttcaggcgagaggacttccccgatggcttcgcgttcggagccgggactgcggcttaccagtatgagggcgcagctgctgaggatgggaggacaccgagcatctgggacacctacacacattcagggaggcatccagaagatggaacaggtgacgtagcttctgatggctatcataagtacaaggaagatgtcaaactaatgactgagattggcctagaggcttatcggttcacaatttcttggtcaagacttatccctagtgggagaggagcggttaatccaaaagggttgcagttttacaacaatatgataaatgaactagtgaaagcaggtattcagatacaagttgccctatatcatagtgacctccctcagagccttcaagacgagtatggtgggtggattaaccccaaaattgttgatgacttcacagcatatgctgatgtgtgcttccgagagttcggcgacagagttgcgcattggacaactgtacttgagccaaatgtcatggctcaaggttgctatgacactggaattcttcctcctaaccattgctcatatccatttggcaacaattgtacaggtggaaattccacggttgagccatacttgtttatacaccataacctgctagctcatgcttcagctgttagactttacagggagaagtaccaagttgcacagaagggcattatcggcataaacatgtactccttgtggttctacccactcacagattcagctgaagatattggtgccactgaaagagcaaaacagttcatgtatggctggatcttgcatcctttggtgtttggagattacccagagaccattaagaaggttgtcggttcccgccttccgttcttctctaaccatgaatctgagctggttactaacgctttcgacttcattggattaaatcactatagctcagtttacacgagcaataataataacgtagtaaaggcacctttacaagacttgactgccgacattgctactttgttcagagccaccaagaatgacacacctactccagagtttctaccaggaaacactgtagatcctcaagggctggagaatgcacttgaatatattcgagaaaactatggaaatttgacgatttatattcaggaaaatggcagtggagcaccagacggaaccctggatgatgtggagaggatcaactatttgcaaaaatacatagcagccacactgaaagccatcaggaatggtgcgaatgtgaagggatactccatgtggtcattcatagatatttacgagatatttggtgggtataacagttggcattatggacttgttgctgtcgatttcggcagcacagaacggagaaggcagccgagacgctctgctagctggtactcagacttcttgaagaacaatgctcccatcagggtggaggatggctcctttgtctctgcagcctctcatgctcaactctga

SEQ ID NO: 574 - protein, 517 aa, Oryza sativa
MERRPLHLHLLLFFSAWLLLLLLQGVSSLQFRREDFPDGFAFGAGTAAYQYEGAAAEDGRTPSIWDTYTHSGRHPEDGTGDVASDGYHKYKEDVKLMTEIGLEAYRFTISWSRLIPSGRGAVNPKGLQFYNNMINELVKAGIQIQVALYHSDLPQSLQDEYGGWINPKIVDDFTAYADVCFREFGDRVAHWTTVLEPNVMAQGCYDTGILPPNHCSYPFGNNCTGGNSTVEPYLFIHHNLLAHASAVRLYREKYQVAQKGIIGINMYSLWFYPLTDSAEDIGATERAKQFMYGWILHPLVFGDYPETIKKVVGSRLPFFSNHESELVTNAFDFIGLNHYSSVYTSNNNNVVKAPLQDLTADIATLFRATKNDTPTPEFLPGNTVDPQGLENALEYIRENYGNLTIYIQENGSGAPDGTLDDVERINYLQKYIAATLKAIRNGANVKGYSMWSFIDIYEIFGGYNSWHYGLVAVDFGSTERRRQPRRSASWYSDFLKNNAPIRVEDGSFVSAASHAQL

SEQ ID NO: 575 - DNA, 489 bp, Glycine max
  CDS (1)..(489)
atgtccaagaaccgcggattcaacctcaggaggcgcctcatccgggtctcgaaatggatcttcaggaagatacggacgcgggctccacgcgagtaccattgcctgggtgactctcctccgtcacccatggtgaagctccttacgtggggccgcaagctgacagcgggtgccaagtcccgcttgaaagtggcgtccggatccggttatgcccaattaggaaccgatccggacccgagtgtgccgaaggggcacctggccgtgtacgtagggcagaaggacggcgagttgcaccgtgttctggtgccggtaatatacttcaaccaccctttgtttggagaattgctgaagcaggcggaggaggagttcgggttccaccacgaagggggaatcaccatcccgtgccggttcaccgagtttgaacgggtgaagacccgaattgcatccggatctcgcagaggcacccgtccgaaaagattggcctggcgctga

SEQ ID NO: 576 - protein, 162 aa, Glycine max
MSKNRGFNLRRRLIRVSKWIFRKIRTRAPREYHCLGDSPPSPMVKLLTWGRKLTAGAKSRLKVASGSGYAQLGTDPDPSVPKGHLAVYVGQKDGELHRVLVPVIYFNHPLFGELLKQAEEEFGFHHEGGITIPCRFTEFERVKTRIASGSRRGTRPKRLAWR

SEQ ID NO: 577 - DNA, 780 bp, Brassica napus
  CDS (1)..(780)
atggcgatggcggcagtaaccggagctgtgctcagtgggcttggttcttcgttcctctccggaggcaagaggagtatcaccgctttgggaagcggcgtaggtactggagctgcgagagttggccggaaaactctgattgtcgctgctgctgctgctcagccgaagaaatcgtggatccccgccgttaaaggtggcggcaacttcctcgaccctgaatggctcgatggctcgctacccggagatttcgggtttgacccgttgggtttaggaaaggacccggcttttcttaaatggtacagagaagcagagctgatccacggcagatgggcgatggcagcggttcttgggatcttcgttggtcaggcatggagcggcgtgccatggttcgaagccggagctgatccacgtgccatcgcaccgttctctttcgggtcgcttctcgggacacagttgcttctcatgggttgggtggagagcaaacggtgggtcgacttcttcaacccggattctcagtctgttgagtgggcgaccccgtggtcgaggaccgctgagaatttcgcaaactacactggcgatcaagggtatcccggagggagattctttgatccgttgggtctcgctgggaagactcgtgacggtgtttatgagccagatagggagaagctggagcggttgaagttggcggagattaagcactctaggctagcaatgcttgcaatgctgatcttttactttgaagccgggcaggggaagacacctctcggtgcacttggtttgtga

SEQ ID NO: 578 - protein, 259 aa, Brassica napus
MAMAAVTGAVLSGLGSSFLSGGKRSITALGSGVGTGAARVGRKTLIVAAAAAQPKKSWIPAVKGGGNFLDPEWLDGSLPGDFGFDPLGLGKDPAFLKWYREAELIHGRWAMAAVLGIFVGQAWSGVPWFEAGADPRAIAPFSFGSLLGTQLLLMGWVESKRWVDFFNPDSQSVEWATPWSRTAENFANYTGDQGYPGGRFFDPLGLAGKTRDGVYEPDREKLERLKLAEIKHSRLAMLAMLIFYFEAGQGKTPLGALGL

SEQ ID NO: 579 - DNA, 1299 bp, Brassica napus
  CDS (1)..(1299)
atggtgagctgtgttttatcaaaatgtggtatcagacctctccctaggttctaccctaaacccacaaactcttttgcctctaacccatcacccactctcaaactcaacccgctacattctctcaactcccgaagtgtgttcttgcctagaacaagaaactgggcgttgaatgtggccacaccattaacaactctcgagactccaccggaggaagaagaagacgcgagtaggttcgaccttggtgcgcctcctcctttcaacttggctgacataagagcagccattcccaagcattgttgggtcaagaatccatggaggtctatgagttacgttgtgagagatgtagctatcgtttttggattggctgctgtagctgcttacttcaatagctggcttctctggcctctctactggtttgctcaaggaaccatgttctgggctctctttgttcttggccatgactgtggacatggtagcttctccaatgatccgaggttgaacagtgtagctggtcatcttcttcattcctcaattctagtcccttaccatggctggagaattagccacagaactcaccaccagaaccatgggcatgttgagaatgatgaatcttggcatcctttgcctgaaagcctctacaagaaactggaaaagactactctaaattttaggttcacactgccattcccaatgctcgcataccctttctacttgtggggaagaagtccagggaaaaatggttctcattttgatccagacagtgacttgtttcttcccaaggagaagaaagatgttgtgacatcaactgcatcttggactgcaatggctgctttgcttgtctgtctcaactttgtcatgggtccaatccaaatgctcaaactatatggcattccttactggatatttgtaatgtggttggactttgtgacttacttgcatcaccatggccatgaagacaagctcccttggtaccgtggaaaggaatggagttacctgagaggagggctcacaacactggaccgtgattatggatggatcaataacatccaccatgacattggaactcatgtgatacatcatcttttcccgcagatcccacattatcatctagtggaagcaacagaagcagctaaaccaataataggaaagtactacagagaaccgaaaaactctggacctttgccacttcacttattgggaagcctcataaaaagtatgaaacaagaccatttcgtaagcgatacaggagacgtcgtgtactatgaggcagatccaaaactcagtggacaaagaacttga

SEQ ID NO: 580 - protein, 432 aa, Brassica napus
MVSCVLSKCGIRPLPRFYPKPTNSFASNPSPTLKLNPLHSLNSRSVFLPRTRNWALNVATPLTTLETPPEEEEDASRFDLGAPPPFNLADIRAAIPKHCWVKNPWRSMSYVVRDVAIVFGLAAVAAYFNSWLLWPLYWFAQGTMFWALFVLGHDCGHGSFSNDPRLNSVAGHLLHSSILVPYHGWRISHRTHHQNHGHVENDESWHPLPESLYKKLEKTTLNFRFTLPFPMLAYPFYLWGRSPGKNGSHFDPDSDLFLPKEKKDVVTSTASWTAMAALLVCLNFVMGPIQMLKLYGIPYWIFVMWLDFVTYLHHHGHEDKLPWYRGKEWSYLRGGLTTLDRDYGWINNIHHDIGTHVIHHLFPQIPHYHLVEATEAAKPIIGKYYREPKNSGPLPLHLLGSLIKSMKQDHFVSDTGDVVYYEADPKLSGQRT

SEQ ID NO: 581 - DNA, 723 bp, Oryza sativa
  CDS (1)..(723)
atggggaggggcaagatagtgatccggcggatcgacaactcgacgagccggcaggtgacgttctcgaagcggcgcaacgggatcttcaagaaggccaaggagctggccatcctgtgcgacgccgaggtcggcctcgtcatcttctccagcaccggccgcctctacgagtatgccagcaccagcatgaagtcagtgattgatcgatatgggcgagctaaggaggagcagcagcacgtcgcaaaccccaactcggagctgaagttctggcaaagggaggcagcaagcttgagacaacaactgcacagcttgcaagaaaatcatcggcagttgatggggcaagatctttctggattgggtgtcaaggaactgcaaactctagaaaatcagctagaaatgagcatacgctgcatccggacaaaaaaggaccagctcatgattgatgaaatccacgaactgaatcgaaagggaagtctcatccaccaagaaaacatggaactgtacagaaaggtcaacctgattcgccaagaaaatgctgagctgtacaagaagctctatgagacaggggcagaaaatgaagcgaatcgagattcaacaactccatacaactttgcggttatcgaggaagccaacactcctgctcgtcttgaactcaatcccccaagccaacaaaatgatgctgagcaaaccacacctcctaaactagggctccaattgcatccatga

SEQ ID NO: 582 - protein, 240 aa, Oryza sativa
MGRGKIVIRRIDNSTSRQVTFSKRRNGIFKKAKELAILCDAEVGLVIFSSTGRLYEYASTSMKSVIDRYGRAKEEQQHVANPNSELKFWQREAASLRQQLHSLQENHRQLMGQDLSGLGVKELQTLENQLEMSIRCIRTKKDQLMIDEIHELNRKGSLIHQENMELYRKVNLIRQENAELYKKLYETGAENEANRDSTTPYNFAVIEEANTPARLELNPPSQQNDAEQTTPPKLGLQLHP

SEQ ID NO: 583 - DNA, 1224 bp, Brassica napus
  CDS (1)..(1224)
atggagtcacgcgtgctgctacgcgccaccgcaacggtcaccggcgtcccgcagctgaggcgaccgatcagagcgatcaaccgccacttcagcactgcgtcttcgtcgttcacggctttcgctaagccgataggatcaatcggagagggagggaacctgatctccggtcgtcagctccgtccggtgctccttctcgatagctcgccggagaaaagagagattctcaagccggttagagccgccgctgccgagggtggtgattcagctggggagacgaaagttggattcctcgggaagtatccgtggcttgtcaccggattcttcttcttcatgtggtacttcttgaacgtgattttcaacatccttaacaagaagatctacaattacttcccttacccctattttgtatcggttattcacttgttcgttggagttgtctactgcttggtgagctggtccgtgggtctacctaaacgggctccaattaactcggacatcctcaaggtattgataccagttgcagtgtgtcacgccataggccatgttactagcaacgtgtccttcgcagccgtcgctgtctccttcactcacaccatcaaagcactggagccattcttcaatgcgtctgcttctcaattccttcttggacaaccgatccccataacactatggttgtttttagctcctgttgtactcggagttgcaatggcttcactcactgagttgtcattcaactggcttggtttcatcagcgccatgatatcaaacatctctttcacttacagaagcatcttctccaagaaagccatgactgatatggacagtacaaatgcctacgcttacatctccatcatcgctcttttcgtctgccttcctcctgccatcatcgtcgaagggcctcaactgttgaagcacggtttcaatgacgcgattgctaaagtgggaatgactaagttcatctctgatctcttctgggttggaatgttttaccatctctacaatcagttggctactaacacgttggagagagtagcaccgttgactcacgctgttggaaacgttctgaaacgtgtcttcgtgatcggtttctccatcgttatcttcggaaacaagatatcgacgcagacaggtgtcggaactggaatagccattgctggagttgcactctactctgtcattaaggccaagatcgaagaagaaaaacggcaaggtaagacggcgtag

SEQ ID NO: 584 - protein, 407 aa, Brassica napus
MESRVLLRATATVTGVPQLRRPIRAINRHFSTASSSFTAFAKPIGSIGEGGNLISGRQLRPVLLLDSSPEKREILKPVRAAAAEGGDSAGETKVGFLGKYPWLVTGFFFFMWYFLNVIFNILNKKIYNYFPYPYFVSVIHLFVGVVYCLVSWSVGLPKRAPINSDILKVLIPVAVCHAIGHVTSNVSFAAVAVSFTHTIKALEPFFNASASQFLLGQPIPITLWLFLAPVVLGVAMASLTELSFNWLGFISAMISNISFTYRSIFSKKAMTDMDSTNAYAYISIIALFVCLPPAIIVEGPQLLKHGFNDAIAKVGMTKFISDLFWVGMFYHLYNQLATNTLERVAPLTHAVGNVLKRVFVIGFSIVIFGNKISTQTGVGTGIAIAGVALYSVIKAKIEEEKRQGKTA

SEQ ID NO: 585 - DNA, 801 bp, Brassica napus
  CDS (1)..(801)
atgacacccttccataaatgctttgcccttttagctctttttgcagcctcatttaagttttgttattgccagaatgaaacaataaatgccgctggctgggccgacgcagacgctggtgctacttggtacggtgaaccagagggagcaggtagcaccggaagagcttgtggatatggcgtggcagtggctaatccaccgctatacgcgatggtttcagccggaggcccttcactattcaacaatggaaaaggatgtggaacatgttatcagattatgtgcaccgggaatccagcatgttcagggagcccaataacggtgacgataacggacgagtgtcccggtggtccttgcgtctctgagccagttcattttgaccttagtcgcaaagccatgggagccttagccaaacctggccaagccgctcaactacgaagcgctggtcctctaagtgttagttacagacgtgctgcgtgtttatatcaaggaactgaaatagcttttcatgttgatgccggttctaccccgttctacgtggcattcgttgtggaatacgaaaacggtgaaggagatttggcctccgttgagattcaaccggccagcggaggatttatgcccaaaggatttatgcccatgcaagaaatgaggtccgccgagtggaagttaaactccggcggtccactgagcgggccgttcaacattagactaacatctggcgagtctcgtaaagtagtggtggctcaggctgttattccggcggattggaagcctgatcagacgtataggtcgattgttaacttctag

SEQ ID NO: 586 - protein, 266 aa, Brassica napus
MTPFHKCFALLALFAASFKFCYCQNETINAAGWADADAGATWYGEPEGAGSTGRACGYGVAVANPPLYAMVSAGGPSLFNNGKGCGTCYQIMCTGNPACSGSPITVTITDECPGGPCVSEPVHFDLSRKAMGALAKPGQAAQLRSAGPLSVSYRRAACLYQGTEIAFHVDAGSTPFYVAFVVEYENGEGDLASVEIQPASGGFMPKGFMPMQEMRSAEWKLNSGGPLSGPFNIRLTSGESRKVVVAQAVIPADWKPDQTYRSIVNF

SEQ ID NO: 587 - DNA, 1206 bp, Glycine max
  CDS (1)..(1206)
atggcaaatagtagatcttggactcaaacatggccatgttttgtcaagctaggtgttctgaatcttgtcttggttttcaaaatcacagcattgggggatgtcagtggaagtgttacagcagaaaacacttgcaagaacacaaattatcaaagttttctccctccaccgtaccagaatatgtcccaaatgatatgcacacctgtatggcacacctatgaattgaggtatttccagaatggtgatacaacaactatcatattatctgctccctacacaatagggtgggtaggaattggattttctagagatggaatgatggttggttccagtgcaatggtgggatggattaccaaacatggtcatgcaaacatgaagcaattttacctaaggggtaggaagtcatcagaagtcaaaatagacaaaggtgaactccccctcaataatatcccttcggctgtggcgactaatggagctgaaattcatatggcatttcagttgcagatgacaaccccatttcagaaacaaccaattttgttggcttttggtagcaaatatccacagaaccaccacctctccaagcatgaagacaaaacagctattgtgtttgacttctctgcaggttctacgggtcctgtatcccgtgaattgattcagatgaggacgaaccatggaattttggctataatagggtggggtctaatcctgcctgtaggggctattattgctagatatttcaggcacaaggatcccttatggttctatctccatgcaatcattcagtttgtaggattcacatttgggcttggtacagtaattcttggattacaactctattccaaaatgcaagtccatataccagctcacagaggcataggcatctttgctctggtactaagtattcttcaggtgttggcactcttcttgagaccaaacaaggattccaagattcgaaaattttggaattggtaccacagttggtttggaaggatggcacttgtatttgcagccattaacatagtgttggggatgcaagctgcgggggcaggaagtgattggaagataggctacggattcgtttttggcattatggttgttgcggctattgttcttgaaatattggcttatttgaaaagatcagagatgcgttctctacctcctaacttccaattggatcctgttggaggagctacatttccaagtaaatga

SEQ ID NO: 588 - protein, 401 aa, Glycine max
MANSRSWTQTWPCFVKLGVLNLVLVFKITALGDVSGSVTAENTCKNTNYQSFLPPPYQNMSQMICTPVWHTYELRYFQNGDTTTIILSAPYTIGWVGIGFSRDGMMVGSSAMVGWITKHGHANMKQFYLRGRKSSEVKIDKGELPLNNIPSAVATNGAEIHMAFQLQMTTPFQKQPILLAFGSKYPQNHHLSKHEDKTAIVFDFSAGSTGPVSRELIQMRTNHGILAIIGWGLILPVGAIIARYFRHKDPLWFYLHAIIQFVGFTFGLGTVILGLQLYSKMQVHIPAHRGIGIFALVLSILQVLALFLRPNKDSKIRKFWNWYHSWFGRMALVFAAINIVLGMQAAGAGSDWKIGYGFVFGIMVVAAIVLEILAYLKRSEMRSLPPNFQLDPVGGATFPSK

SEQ ID NO: 589 - DNA, 1137 bp, Oryza sativa
  CDS (1)..(1137)
atggcgaccgccgttgcgtcccaggttgctgtctctgctccggctggctcggatcgcggcttgaggagttctgggatccagggtagcaacaatattagctttagcaacaaatcatgggttggcaccacattggcgtgggagagcaaggccacgcgaccgaggcatgcgaacaaggtgctctgcatgtcagttcagcaagcgagcgaaagcaaggttgctgtcaagcctcttgatttggagagtgctaacgagccgccgctcaacacatacaaaccaaaggagccttacaccgccacaattgtctcggttgagaggatcgtaggccccaaggctccaggagagacatgccacattgttattgatcatggtggcaatgtgccttactgggaggggcaaagctatggcattattcctccaggggagaacccgaagaagcctggtgcaccacataatgtccgtctttattcaattgcatctacaaggtatggagattcattcgatggaaggaccactagtttatgtgtgcgccgtgccgtttattatgatcctgaaactggcaaggaggacccctcaaaaaatggtgtctgcagtaacttcctatgtaattcaaaaccaggggacaaggttaaagtgacaggtccgtcaggcaaaataatgctcctgcctgaggaagatccaaatgcaactcacatcatgatagctactggcactggtgttgctccattccgtggctacctacgccgtatgttcatggaagatgtcccaaagtacagatttggtggcttggcctggctcttccttggtgtggctaacactgacagccttctctatgatgaagagttcacaagctaccttaagcagtatccagacaatttcaggtatgacaaagcgctaagcagggagcagaaaaacaagaacgctggcaagatgtatgtccaggacaagatcgaggagtacagcgacgagatcttcaagctcttggatggcggcgcgcacatctacttctgtggtttgaaggggatgatgcctgggattcaagacaccctcaagaaagtggcggagcagagaggggagagctgggagcagaagctatcccagctcaagaagaacaagcaatggcacgttgaggtctactag

SEQ ID NO: 590 - protein, 378 aa, Oryza sativa
MATAVASQVAVSAPAGSDRGLRSSGIQGSNNISFSNKSWVGTTLAWESKATRPRHANKVLCMSVQQASESKVAVKPLDLESANEPPLNTYKPKEPYTATIVSVERIVGPKAPGETCHIVIDHGGNVPYWEGQSYGIIPPGENPKKPGAPHNVRLYSIASTRYGDSFDGRTTSLCVRRAVYYDPETGKEDPSKNGVCSNFLCNSKPGDKVKVTGPSGKIMLLPEEDPNATHIMIATGTGVAPFRGYLRRMFMEDVPKYRFGGLAWLFLGVANTDSLLYDEEFTSYLKQYPDNFRYDKALSREQKNKNAGKMYVQDKIEEYSDEIFKLLDGGAHIYFCGLKGMMPGIQDTLKKVAEQRGESWEQKLSQLKKNKQWHVEVY

SEQ ID NO: 591 - DNA, 1017 bp, Zea mays
  CDS (1)..(1017)
atggccagaggcgaagaggcagtggtagacatgccaaggtcatcagccggggcgtcatgcacagcagttgaccattctgagcagagcagaaaggatgatgaatatgagaggctggttacaagagctcaacatgcaacatctgatgttggcacgacaattttatctgagcaaccaaagtcaagatctttcatttggtggatgaaagttctgcttggctgcttccttcttatattagtgggctatgtcttcgtgaaatggggggtcccctttgtctttgagaaggttctcttgccaatcatgcaatgggaagccagtgcttttgggcgtccagtattagctattgttctcgttgcatctttggctctctttccagttattctagttccttctggaccttctatgtggttagcaggaatgatctttggatatggttggggtttcttgattataatggccgggagtactattggcatggtggttccatattggattggttcattgttccgtgaacgtctgcatgtatggctgacaaagtggcctcagcagatagcactaataaaactcgcgggtgaaggaaattggttccagcagtttcgggttgtcgcgcttttcagaatctcaccattcccatatacaatttttaattatgccgtgactgtgacagaaattaagttcaacccttatctatgtggttctgttgctggaatggtacctgaggccttcatttatatctacagtgggcgtttaatacgtacattggctgacatgaagtacggtaactataaaatgacaccagtggaaatagcatacaacgccatttccttcgtcatcgctatcgccctcacggtcgccttcacggtgtacgcgaagagagctctgggtgacataaaaagtccggacgatggcatcggtaaagaagaagaagatcacggcccaaatggctcaggggtgcgtatgaatcgtcgtcaggagcgtgcgcgtgccgatgcacgttacatagaactagatgatatgtga

SEQ ID NO: 592 - protein, 338 aa, Zea mays
MARGEEAVVDMPRSSAGASCTAVDHSEQSRKDDEYERLVTRAQHATSDVGTTILSEQPKSRSFIWWMKVLLGCFLLILVGYVFVKWGVPFVFEKVLLPIMQWEASAFGRPVLAIVLVASLALFPVILVPSGPSMWLAGMIFGYGWGFLIIMAGSTIGMVVPYWIGSLFRERLHVWLTKWPQQIALIKLAGEGNWFQQFRVVALFRISPFPYTIFNYAVTVTEIKFNPYLCGSVAGMVPEAFIYIYSGRLIRTLADMKYGNYKMTPVEIAYNAISFVIAIALTVAFTVYAKRALGDIKSPDDGIGKEEEDHGPNGSGVRMNRRQERARADARYIELDDM

SEQ ID NO: 593 - DNA, 720 bp, Brassica napus
  CDS (1)..(720)
atgaggcctaagatcgttctttttggcgattccatcactgaagaatcatttggcgacggtggctggggagcttctctcgccgatcttctccgccgcaaggctgatgtggtgttacgaggatacagtggatataacacgagatgggcgttaaaagtgatggagagagtttttcaggcagcgggagacggcggagcatatccatcggcagtgactgtattttttggagccaacgatgcgtgtctgccggaaagatgctcggggtttcagcatgtgccacttctcgaatataaacagaatcttcgctcaattgtttcgtttctcaagaatcgttggccacgaacggtcattattcttataactccaccaccaatcgacgaagaggctcggctccgatatccttatatcgaaaacactataggcttgccagaaagaacaaacgaagcagcaggaacatacgcaaaaacgtgtgtagccgtagctagtgaatgccaaatcccagcgatcgatctttggtccaagatgcagcaaattccgaactggcaaattgaatgtctatgggacggtttacatttgagtcgggtcgggaacaaagtggtttttgaagaagttacaaatacgcttaaaggagaaggtattggagctgaggacttagttgtggatcttcccctcattgaagacgttgacccaaagaaacctctcacggcctttgatgagttatga

SEQ ID NO: 594 - protein, 239 aa, Brassica napus
MRPKIVLFGDSITEESFGDGGWGASLADLLRRKADVVLRGYSGYNTRWALKVMERVFQAAGDGGAYPSAVTVFFGANDACLPERCSGFQHVPLLEYKQNLRSIVSFLKNRWPRTVIILITPPPIDEEARLRYPYIENTIGLPERTNEAAGTYAKTCVAVASECQIPAIDLWSKMQQIPNWQIECLWDGLHLSRVGNKVVFEEVTNTLKGEGIGAEDLVVDLPLIEDVDPKKPLTAFDEL

SEQ ID NO: 595 - DNA, 879 bp, Brassica napus
  CDS (1)..(879)
atggagatggatttgtttgtcacacctgagaagcagaggaaccatcctccttcagtgagcttggggaaaactcctgtgagaaggaagttgatagttgatgacgataacgaggttgtgtcagagaagaaaggtcaatcaagaacttctggaggtggccttcgccaattcagcgttatggtttgtcagaagctggaagccaagaagataactacttacaaagaggttgcagatgaaataatttcggattttgcaactattaagcagaactcggagaagcctttgaacgacaatgagtataacgagaagaacataaggcggagagtgtatgatgcactcaatgtgttcatggctttggatattatcgctagggataaaaaggaaatccgttggaaaggccttcccattacttgtaaaaaggatgtggaagaagttaagatggatcgaaataagattatgaatagtgtgcaaaagaaggctgctttccttaaagaattgagagaaaaggtatcaagtcttgagagtcttatgtcgagaaacaaggagatggttgtgaagactgaaggaccagcagaaggatttactttacccttcattctacttgagacaaatcctcatgcagtagtcgaaatcgagatctctgaagacatgcaacttgtacacctcgacttcaataacacgcctttctcggtccatgacgatgcttacatattgaaactgatgcaagaacacaagcagcagcagcagcagcagcggaacagagtttcgtcgccttcctctacacatcaacactcttctgctcattcttcctccagttcttgcattgcttctggaacctctggcccggtttgctggaactcgggatccattgatactcgctga

SEQ ID NO: 596 - protein, 292 aa, Brassica napus
MEMDLFVTPEKQRNHPPSVSLGKTPVRRKLIVDDDNEVVSEKKGQSRTSGGGLRQFSVMVCQKLEAKKITTYKEVADEIISDFATIKQNSEKPLNDNEYNEKNIRRRVYDALNVFMALDIIARDKKEIRWKGLPITCKKDVEEVKMDRNKIMNSVQKKAAFLKELREKVSSLESLMSRNKEMVVKTEGPAEGFTLPFILLETNPHAVVEIEISEDMQLVHLDFNNTPFSVHDDAYILKLMQEHKQQQQQQRNRVSSPSSTHQHSSAHSSSSSCIASGTSGPVCWNSGSIDTR

SEQ ID NO: 597 - DNA, 1398 bp, Brassica napus
  CDS (1)..(1398)
atgggaatagtgatggtgatgattggttttctctttgtcctcgttttgctctgttctgcgctgctccgatggaacgaaatgcgatacagcaagactaatctccctcctggaaccatggggtggccaatctttggcgaaacaaccgagttcctcaaacaaggccctgacttcatgagaaaccaaagactcagatatgggagtttcttcaaatcgcatcttcttggttgtccaactttagtgtcgatggacacagagatcaacagatacatattaaagaacgaatcgaaaggtttggttcctggttatccacaatcgatgcttgacattctcgggacttgcaacatggctgcggttcatggttcgagccaccgccttatgagaggctcgcttctttcactcataagctcaaccatgatgagagatcaaatcttgcccaaagtcgattacttcatgagaagttatcttggtcagtggagtgagcttgggaatgttgatatccaggataagaccaaacatatggcgtttttatcttctttgtcacaaatcgctggaaatttaagaaagccactcgttgaagaattcaaaaatgagttcttcaagcttgttgttggaactctctccgtcccagtcgatctacccggcacaaattatcgttgtggaatccaagcaagaaagaacattgataggttacttagcgagttgatgcaagagcgtaaagattctggagaaacatttacagacatgttaggttacttgatgaagaaggaagacaacagatacccattaaccgatgaagagataagagaccaagtcgtaacgatcttgtattcaggttacgaaactgtctctactacctcaatgatggctcttaagtacctctatgatcatccaaaagctcttgaagaactcagaaaagagcatttgaccataagggaaagaaaacgacaagacgacccactcgatttagagaatgtgaagtcaatgaagttcactcgagctgtgattttagagacatcaagactggcaacaatcgttaatggggtcctgaggaaaactacccgcgacatggaaatcaacggttatttaattccgaaaggatggagaatttacgtatacacgagagaaattaattacgacacaaatctttacaaggacccattgatctttaatccgtggagatggatggagaagagcttggagtcacaaaactcatgctttgtgtttggaggtgggacaaggctttgccctggaaaggaactagggattgttgagatatcgagcttcctccattattttgttacaagatacagatgggaggagatgggaggggataaactaatggtgtttccaagagtttttgcaccaaagggctttcatcttaggatttcaccttactaa

SEQ ID NO: 598 - protein, 465 aa, Brassica napus
MGIVMVMIGFLFVLVLLCSALLRWNEMRYSKTNLPPGTMGWPIFGETTEFLKQGPDFMRNQRLRYGSFFKSHLLGCPTLVSMDTEINRYILKNESKGLVPGYPQSMLDILGTCNMAAVHGSSHRLMRGSLLSLISSTMMRDQILPKVDYFMRSYLGQWSELGNVDIQDKTKHMAFLSSLSQIAGNLRKPLVEEFKNEFFKLVVGTLSVPVDLPGTNYRCGIQARKNIDRLLSELMQERKDSGETFTDMLGYLMKKEDNRYPLTDEEIRDQVVTILYSGYETVSTTSMMALKYLYDHPKALEELRKEHLTIRERKRQDDPLDLENVKSMKFTRAVILETSRLATIVNGVLRKTTRDMEINGYLIPKGWRIYVYTREINYDTNLYKDPLIFNPWRWMEKSLESQNSCFVFGGGTRLCPGKELGIVEISSFLHYFVTRYRWEEMGGDKLMVFPRVFAPKGFHLRISPY

SEQ ID NO: 599 - DNA, 966 bp, Brassica napus
  CDS (1)..(966)
atggatctccagccagaagagctccagttcttgacgattcctcaactccttcaagaatccatctcaatcaagaaacgatctccaagaaccttctacctcatcaccctctccctaatcttccctctctccttcgccatcctcgctcactccctcttcacccagccgctgctcgccaagctcgactcctccgaccctcctaactcggatcgttctcgtcacgactggaccaagctcctgatcttccagttcagctacctcatcttcctcttcgccttctctctcctctcgaccgccgccgtggtcttcaccgttgcctctctctacaccgggaagccagtctccttctcctccaccatctccgccatccccaaagtctttaaacgactcttgatcactttcctctgggtcgctctcttgatgttcgcttacaacgcggtcttctttgtcttcctagtgatcctcttcgtagctctcgacatgaacagtgtaggcttagcggttatcgccggactgttgatcgctgttctgtacttcggtgttcatgtctatttcactgcgttatggcatttaggcagcgtgatctcggttcttgagccggtttatggacttgcagccatgagaaaagcttatgagcttctcaaagggaaggttaagatggctaccgggttggtctttgtttaccttttgctctgtgcgttgattgggattactttcgggtcgattgtggttcacggtggaggaaagtatgggactttgactaggactctggttggtggtttgcttgttggtgttcttgtggtggtgaatcttgtgggtttgttggttcagagtgtgttttattatgtttgcaagagttatcatcaccagacgattgataagacagctttgtatgatcatcttggtgggtatcttggtgattatgtgcctcttaagagcaacattcagttggagaatttagacatttga

SEQ ID NO: 600 - protein, 321 aa, Brassica napus
MDLQPEELQFLTIPQLLQESISIKKRSPRTFYLITLSLIFPLSFAILAHSLFTQPLLAKLDSSDPPNSDRSRHDWTKLLIFQFSYLIFLFAFSLLSTAAVVFTVASLYTGKPVSFSSTISAIPKVFKRLLITFLWVALLMFAYNAVFFVFLVILFVALDMNSVGLAVIAGLLIAVLYFGVHVYFTALWHLGSVISVLEPVYGLAAMRKAYELLKGKVKMATGLVFVYLLLCALIGITFGSIVVHGGGKYGTLTRTLVGGLLVGVLVVVNLVGLLVQSVFYYVCKSYHHQTIDKTALYDHLGGYLGDYVPLKSNIQLENLDI

SEQ ID NO: 601 - DNA, 1620 bp, Brassica napus
  CDS (1)..(1620)
atggaaggggaagaagacaccgtgccaaagaagaaaatggcgaaacagctgaccggaaaacgcgaagacacactgctccattcagctgtgagacgtggaaacaaggacgaagtagttgagattcttacaaaaaccagagagcctcagttgaatgagctgttggggaaacagaaccaatcaggtgagaccgcactctacgttgcagcagagtatggtgatgttgagattgttaaagagatgatcaaacgctatgatctttctcttgttgagatcaaagcaagaaacgggttcgatgccttccacattgctgccaagcaaggagatctcgatgtgttgaaggttttagcagaggctcactcggagctagcgatgacggtggatttgttgaacacaacggcactgcacacagctgcaacgcaaggacacacggaggttgtgaactttctactggaactaggaagcagcctagcgggaatcgccaagagcaacggtaagacagctctacactctgcgtcaaggaacgggcacgtgaaggtcgtcaaggctctattagcatcagagccagcgattgcaatcaggatggacaagaagggacaaacagcgcttcacatggcagctaaaggaacaaacgtcgaggtcgtagaggagctcatcaaagcggatagatcctctataaacatagcagacacaaagggaaacacggcgctgcacatcgcagctagaaaaggaagatcacagatcgttaagctgctgctagacaacaacataacggacacaaaagctgttaacagaacaggagaaacggcgctcgacacagcggagaaggttgggaacccagaggtggctcttatattacagaagcacggagtccccagcgccaagaccattaagccctcaggggctaaccctgctagggagctgaaacagacagtaagcgatatcaagcatgaggttcataatcaacttgagcacacgcgccagacgagaagacgcgttcaaggaatcgcaaaacagctcaacaaaatgcacacggaaggtctcaacaacgcgatcaactcaaccactgttgtggccgtgctgatagctacggttgcctttgcagctatcttcactgtcccggggcagtacgtagaagacataactaatcttccagatgggcattcactaggagaagccaacattgcatcaacgaccccgttcataatcttcttcatctttgactccatcgcactcttcatctcattagcagttgtggtggttcagacgtcggtggtggtgatagagagcaaggccaagaagcagatgatggctgtgataaacaaactcatgtggctcgcctgcgttcttatctctgttgcctttttggctctgtcgtttgttgtcgttggtgaagaagagaagtggctagctatttgggtgactgctatcggtgcgacgatcatgatcactacgttagggaccatgtgctactggattatacagcacaagattgaagctgctaatgcgagaaacataagaagatcctccatcaacaacagtaaatctggttcttgggggattcctcagcttacggatacagatgttctccaaaacgagtgtaagaaaatgtatgcaatctga

SEQ ID NO: 602 - protein, 539 aa, Brassica napus
MEGEEDTVPKKKMAKQLTGKREDTLLHSAVRRGNKDEVVEILTKTREPQLNELLGKQNQSGETALYVAAEYGDVEIVKEMIKRYDLSLVEIKARNGFDAFHIAAKQGDLDVLKVLAEAHSELAMTVDLLNTTALHTAATQGHTEVVNFLLELGSSLAGIAKSNGKTALHSASRNGHVKVVKALLASEPAIAIRMDKKGQTALHMAAKGTNVEVVEELIKADRSSINIADTKGNTALHIAARKGRSQIVKLLLDNNITDTKAVNRTGETALDTAEKVGNPEVALILQKHGVPSAKTIKPSGANPARELKQTVSDIKHEVHNQLEHTRQTRRRVQGIAKQLNKMHTEGLNNAINSTTVVAVLIATVAFAAIFTVPGQYVEDITNLPDGHSLGEANIASTTPFIIFFIFDSIALFISLAVVVVQTSVVVIESKAKKQMMAVINKLMWLACVLISVAFLALSFVVVGEEEKWLAIWVTAIGATIMITTLGTMCYWIIQHKIEAANARNIRRSSINNSKSGSWGIPQLTDTDVLQNECKKMYAI

SEQ ID NO: 603 - DNA, 357 bp, Brassica napus
  CDS (1)..(357)
atgacagctttgaaagatgtcgcgggtatagctggttatcactccagcaactgtgacaatgaagttgaaatgatcagcaaagtttcctcagatgttacagttgagttgggttttacaccatcaaaagattttgacgacttggttggcataggagctggtatcacggagataaaatcaaagttgatcctacaatccgaacaagttaaggtgattgtgcttgtgggtcctcccgggattggtaagacagaactgccagagttttatacaaccaactctctcctggttttccattcagcactttttgggaggatatcaaaggaagttatgagaagccttgtggtaacgactacctgttga

SEQ ID NO: 604 - protein, 118 aa, Brassica napus
MTALKDVAGIAGYHSSNCDNEVEMISKVSSDVTVELGFTPSKDFDDLVGIGAGITEIKSKLILQSEQVKVIVLVGPPGIGKTELPEFYTTNSLLVFHSALFGRISKEVMRSLVVTTTC

SEQ ID NO: 605 - DNA, 876 bp, Glycine max
  CDS (1)..(876)
atgggtgagaaagatgatgattttgggttgagtttgagtttgagtttggggagagtgaaccaacaacaacaacaccctcctcctttgaatcacatgcaccagcctcaacaactacaacctgttcccatgaatcacaataagactctctttggtgatttgtctcagttaccagaccggagctccgaaatgatacgaggaatcgacgtcaattcggcggcggagtgcgacggcgtttcctcgccgaacagcgctgtctcgagcgtgagcggcggcgacggcaagcagagcgagagggacgacgataataatgctgccgccgtggccggtgagaggacctcgtgctcgcgagggagcgacgatgacgacggtggtggcagcgatgcctcgaggaagaagctgaggctgacgaaagaacagtccatggtgttggaagaaacgttcaaggagcatagcacgctgaatccgaaacggaagcaagcgttggcagaggagttgaatctgaagcccagacaagtagaggtgtggtttcagaacagaagagcaaggaccaagttgaagcaaactgaagtggattgtgaatacttaaagagatgctatgagaatttaactgaagagaatagaaggttgcacaaggaggtccaagagcttagggcattgaaattatccccacaaatgtacatgcatatgaaccctcccaccactcttacaatatgcccttcttgtgagcgtactcactcctttgcatcctcctccactgccaccatccactcggcggtggcggccacatcgagcaatcgcaaactgttcggcacaaacatccggctgcccgtgtccttcaacactcggccatttgaaggcccaattcctcggccataa

SEQ ID NO: 606 - protein, 291 aa, Glycine max
MGEKDDDFGLSLSLSLGRVNQQQQHPPPLNHMHQPQQLQPVPMNHNKTLFGDLSQLPDRSSEMIRGIDVNSAAECDGVSSPNSAVSSVSGGDGKQSERDDDNNAAAVAGERTSCSRGSDDDDGGGSDASRKKLRLTKEQSMVLEETFKEHSTLNPKRKQALAEELNLKPRQVEVWFQNRRARTKLKQTEVDCEYLKRCYENLTEENRRLHKEVQELRALKLSPQMYMHMNPPTTLTICPSCERTHSFASSSTATIHSAVAATSSNRKLFGTNIRLPVSFNTRPFEGPIPRP

SEQ ID NO: 607 - DNA, 465 bp, Brassica napus
  CDS (1)..(465)
atgggaatccaaactcttatatggcaagtgacgaagaaagcattcactggaggtattatagggcttaccatttcagataggttttgtagcgttgttccggtgagaggagactccatgtctcccacgtttaatccccaacgagattcttatttagatgattatgtgctcgtagacaaattctgccttaaggattacaagtttgcgcgtggtgatgttgtagtgttcagctcgccgagtcattacaaggaaagatacataaagaggatagtggggatgcctggggaatggataagtagtactgaggatgtgatcagagttccagaaggacattgttgggtagaaggagataacaaagcttccagcttagactcaagaacctttggccctattcccttgggtttaattggaggacgggtcactcgtgtcgtgtggcctcctcaaagactaagcaagattggtggctaa

SEQ ID NO: 608 - protein, 154 aa, Brassica napus
MGIQTLIWQVTKKAFTGGIIGLTISDRFCSVVPVRGDSMSPTFNPQRDSYLDDYVLVDKFCLKDYKFARGDVVVFSSPSHYKERYIKRIVGMPGEWISSTEDVIRVPEGHCWVEGDNKASSLDSRTFGPIPLGLIGGRVTRVVWPPQRLSKIGG

SEQ ID NO: 609 - DNA, 963 bp, Zea mays
  CDS (1)..(963)
atggccagcactcgtgcagcagcaactctccttttgctcctcgcgctcgccggcacctcgtcggcgcagctgtccacgggcttctactcctactcgtgccccggcgtgtacggcgccgtcaagtcggtgatgcagtccgccatcgccagggagaagcgcatgggggcctccatcctccgcctcttcttccacgactgcttcgtccagggctgcgacgcgtcgctgctgctggacgacacgcccagcttccagggcgagaagatggccaaccctaacaacggctccgtcaggggattcgaggtcatcgacgccgtcaagtccgccgtcgaaaagctgtgccccggcgtcgtctcctgcgccgacatcctcgccatcgccgccagggacagcgtcgtcatcctgggtggtccgacctgggacgtgaaggtcgggcggcgggactccacgacggcgagcttcagcggcgccaacaacaacatcccgccgccgacgtcgggcctcgccaacctcacgtcgctcttcgccgcgcagggactttctcagaaggacatggtcgcgctctctggtgctcacaccatcgggcaggcacgctgcaccaacttcagagcccacatctacaacgacaccgacatcgacgctgccttcgcgagaacgaggcagtcaggctgcccaagcacctcaggcgccggcggcgacaacaacctggcgccattggacctccagacccctaccgtcttcgagaacaactactacaggaacctcctcgccaagaaggggctcctgcactccgaccaggagctcttcaatggcggagccaccgacgcgctggtccagtcctacgtcgggagccagagcgcgttcttcgcggatttcgtggcgggcatgatcaagatgggcgacatcacaccgctgaccggctccaacaacggacagataaggaagaactgcagaagagtcaattag

SEQ ID NO: 610 - protein, 320 aa, Zea mays
MASTRAAATLLLLLALAGTSSAQLSTGFYSYSCPGVYGAVKSVMQSAIAREKRMGASILRLFFHDCFVQGCDASLLLDDTPSFQGEKMANPNNGSVRGFEVIDAVKSAVEKLCPGVVSCADILAIAARDSVVILGGPTWDVKVGRRDSTTASFSGANNNIPPPTSGLANLTSLFAAQGLSQKDMVALSGAHTIGQARCTNFRAHIYNDTDIDAAFARTRQSGCPSTSGAGGDNNLAPLDLQTPTVFENNYYRNLLAKKGLLHSDQELFNGGATDALVQSYVGSQSAFFADFVAGMIKMGDITPLTGSNNGQIRKNCRRVN

SEQ ID NO: 611 - DNA, 1089 bp, Oryza sativa
  CDS (1)..(1089)
atggctactgcggtaactgctgcagtgtcctttccagccaccaagtccacttctctttcaagcagaacctctatcactgccccagatagaattgtcttcaagaaggtttcgttgcaatacagagatgtttcaaccagtggaagggtagtttcaatcagagcacaagtgaccacagaggcacctgctaaggttgaaaaggaatcaaagaaacaggaggaaggtgtgatcgtgaacaagttcaaacccaagaacccatatattggtaggtgtcttctcaacacaaagatcactggggatgatgcacctggagaaacttggcacatggtcttcagcactgagggagaagttccttacagagaaggacaatcaatcggggtaattcctgatggggttgacaagaatggcaagcctcacaagctgagattgtattcaattgctagcagtgcccttggtgattttggagattccaaaactgtttctttatgcgtgaaacgtcttgtgtacacaaatgaaaacggagaacttgtcaaaggagtttgctcaaatttcttgtgcgacttgaagccaggagccgaagtaaagattactggacctgttggtaaagaaatgcttatgccaaaagatcctaatgcaaccgtcatcatgttggcaactggaacaggaattgccccattccgctcatttttatggaaaatgttctttgagaagcatgatgattacaagttcaatggtttggcatggctcttcttgggtgtccccacaagcagctcactactttataaggaggaatttgaaaagatgaaggagaaagcacctgacaacttcaggcttgactttgctgtgagcagagagcaaacaaacgaaaaaggagagaaaatgtacatccaaacacgaatggctcaatatgcagaagagttatgggaattactgaagaaagataacacttttgtctatatgtgtggactgaagggaatggaaaagggtatagatgacataatggtttcattggctgcaaaagatggtattgattggattgagtacaagaggcaattgaagaaggcagagcaatggaatgtcgaagtctactaa

SEQ ID NO: 612 - protein, 362 aa, Oryza sativa
MATAVTAAVSFPATKSTSLSSRTSITAPDRIVFKKVSLQYRDVSTSGRVVSIRAQVTTEAPAKVEKESKKQEEGVIVNKFKPKNPYIGRCLLNTKITGDDAPGETWHMVFSTEGEVPYREGQSIGVIPDGVDKNGKPHKLRLYSIASSALGDFGDSKTVSLCVKRLVYTNENGELVKGVCSNFLCDLKPGAEVKITGPVGKEMLMPKDPNATVIMLATGTGIAPFRSFLWKMFFEKHDDYKFNGLAWLFLGVPTSSSLLYKEEFEKMKEKAPDNFRLDFAVSREQTNEKGEKMYIQTRMAQYAEELWELLKKDNTFVYMCGLKGMEKGIDDIMVSLAAKDGIDWIEYKRQLKKAEQWNVEVY

SEQ ID NO: 613 - DNA, 642 bp, Brassica napus
  CDS (1)..(642)
atggaattagttgaagagatgggtgaaaaaagagttgtggtggacaaagcatatctctacgaagaagacaaaccacttactgtctgcaaaacctctcttttctacactggtgatggcttcgccgcctacgactgtcacggcgatatcatctttagggtcgattcatacggacccgacacaagagataacgacgagtttgtcctcatggatgtcgccggaaagtgtctcctcaccgttaaacgaaagagaccaactctgcaccaaagatgggagggttttctcggggagagatcagacggtcagaaaccaatattcagcgtccgaagatcgtcaataatcggacggtgcacgatggaagtagaggtttacgacggaacaggagaagagtacaccatagatggtgacttctcgcaacgtagctgtctcatatacgacacgaataagcgaactgtggctgagatcaaacgcaaagtgaacgcgtcaacgaacgtgatgcttggacgagatgtgttcactctcgagattaaacctggtttcgacggagctttcgtgatgggtttggtccttgtgcttgaccagatcaacggtgatgatccagttgagattggtgatgaacaggtgcacccttttgttgaggactag

SEQ ID NO: 614 - protein, 213 aa, Brassica napus
MELVEEMGEKRVVVDKAYLYEEDKPLTVCKTSLFYTGDGFAAYDCHGDIIFRVDSYGPDTRDNDEFVLMDVAGKCLLTVKRKRPTLHQRWEGFLGERSDGQKPIFSVRRSSIIGRCTMEVEVYDGTGEEYTIDGDFSQRSCLIYDTNKRTVAEIKRKVNASTNVMLGRDVFTLEIKPGFDGAFVMGLVLVLDQINGDDPVEIGDEQVHPFVED

SEQ ID NO: 615 - DNA, 1224 bp, Brassica napus
  CDS (1)..(1224)
atgttggaagacataccaaagagatggaaagtgctaagtggccaaaacaaatggaaaggcctgcttgatccacttgactcggacctacgtcgctacctcattcactatggcgagatggctcaggttggttatgacgcctttaactgggaccgtaagtccgaatactgcggtgactgttattactccaagagtcaaatccatgctcgaaccggctaccttaaagccaaccctatcaggtacaatgtgaccaagtacatctatgcaacagcttctataaagatgccactttgtttcatcgtcaagtctttgtcaaagaaagcctcgcgcgtgcagactaactggatgggttacattgcggtcgctacagacgaggggaaggcgatgctagggaggagagacattgttgtcgcttggagaggaactcttcagccgtatgaatgggctaacgacttcgattttcctcttgagtcaggtgttaaagttttccctgtaagcgaccgcaaacacgtgcctcgtattggaagtggctggcttgatgtttatacagcttcggatgctaagtctccttatgacacgactagcgcacgtgaacaggtacaagcagagctaaagagactgctagaagtctacaagaacgaagaagtaagcatcactttcacaggccacagcttgggcggagtgatgtcaacactagcagctgcagatctcgtccacagcagtcaaaacaagattcacacaggtcttcaaagcaaacaagtccccatcacagttttcgcattcgggtgccctcgaataggagaccaagacttcaagaaagtagtcagctcgcacaaacaactaaacatcctaagaatagtaaacgttcccgacgtggcaccaaactatccgctcttcatgtatgcagaggtaggcgaggtgctgcagatcaacacgctgaactcgacttacctgaaacggtctctgaactggaggaactaccataacctggagatatacctgcacgggatagcggggatgcaggacaagtccggggtgtttaagctggagattggtcgggatgtttcattggttaataaagggttggatgctctgaaggataagtacttagtgccgagtgtctggaggtgtcttgcgaatagagggatggttcagatggatgatgggacgtggaagctggatgtccacaggtatgaagatgatgatgatggctccacaaataagtaa

SEQ ID NO: 616 - protein, 407 aa, Brassica napus
MLEDIPKRWKVLSGQNKWKGLLDPLDSDLRRYLIHYGEMAQVGYDAFNWDRKSEYCGDCYYSKSQIHARTGYLKANPIRYNVTKYIYATASIKMPLCFIVKSLSKKASRVQTNWMGYIAVATDEGKAMLGRRDIVVAWRGTLQPYEWANDFDFPLESGVKVFPVSDRKHVPRIGSGWLDVYTASDAKSPYDTTSAREQVQAELKRLLEVYKNEEVSITFTGHSLGGVMSTLAAADLVHSSQNKIHTGLQSKQVPITVFAFGCPRIGDQDFKKVVSSHKQLNILRIVNVPDVAPNYPLFMYAEVGEVLQINTLNSTYLKRSLNWRNYHNLEIYLHGIAGMQDKSGVFKLEIGRDVSLVNKGLDALKDKYLVPSVWRCLANRGMVQMDDGTWKLDVHRYEDDDDGSTNK

SEQ ID NO: 617 - DNA, 1524 bp, Oryza sativa
  CDS (1)..(1524)
atggcatcggcgatgggcgccaccggcgacaagccgccgcacgccgtgtgcgtgccgtacccgtcgcagggtgacatcacgccgacgctgcacctcgccaagctgctccacgcccggggcttccacgtcaccttcgtcaacaccgagttcaaccaccgccgcctcctcgcctcccgtggcgccgccgcgctcgacggcgtgccgggcttcgtcttcgccgccatccccgacgggctaccggcgatgtctggcgaggacgaggacgccacgcaggacatccccgcgctgtgccagtccaccatgacgaactgcctcggccacctccttgcgctgctgtcgaggctcaatgagccggcgtcggggtcgccgccggtcacctgcctcgtcgccgacggcctcatgtcgttcgcgtacgacgccgccagggtgatcggcgtgccgtgcgccgcgctgtggacggccagcgcctgcggcttcgtggggtgtcgcctctaccgcgagctcatcgaccgtggcctggtgccgctccgggacgcggcgcagctcaccgacgggtacctcgacacggtggtcgacggcgccgccgcccgcggcatgtgcgacggcgtccagctgcgcgactaccccagcttcatccgcaccacggacctcggcgacgtgatgctcaacttcatcatgcgcgaggccgagcggctgtccctccccgacgccgtcatcctcaacaccttcgacgacctcgagcggccggcgctggacgccatgcgcgccgtcctcccgccgccggtctacgccgtcggcccgctccacctccacgtccgccgcgccgtccccaccggaagcccgctgcacggcgtgggttccaacctctggaaggagcaggacggcctcctcgagtggctcgacggccaccggcccagctccgtcgtgtacgtgagctacggcagcatcgcggtgatgacgagcgagcagctgctggagttcgcgtgggggctcgccgacagcggctacgccttcgtgtgggtcgtccgcccagacctcgtcaaggggggagagggcgacgccgccgcgctgccgccggagttccacgccgccgtcgagggccgtggcgtcctcccggcgtggtgcccgcaggagaaggtcctcgagcacgacgccgtgggcgtgttcctgacgcactccgggtggaactcgacactggagagcctagccgccggcgtgccgatgctgagctggcccttcttcgcggagcagcagacgaactgccggtacaagaggacggagtggggcatcgggatggagatcggcggtaacgcgcggcgaggggaggtggcggcgatgatacgggaggccatggaggggaagaaggggcgtgagatacggcggcgtgcacaagagtggaaagagaaggctgtacgagtgacgctgccaggtgggcccggggacaccaaccttgaccgagtcatccacgacgtgttgctgtcgtgtaaggataaaattagcagggtgaatggtgagagtgtatga

SEQ ID NO: 618 - protein, 507 aa, Oryza sativa
MASAMGATGDKPPHAVCVPYPSQGDITPTLHLAKLLHARGFHVTFVNTEFNHRRLLASRGAAALDGVPGFVFAAIPDGLPAMSGEDEDATQDIPALCQSTMTNCLGHLLALLSRLNEPASGSPPVTCLVADGLMSFAYDAARVIGVPCAALWTASACGFVGCRLYRELIDRGLVPLRDAAQLTDGYLDTVVDGAAARGMCDGVQLRDYPSFIRTTDLGDVMLNFIMREAERLSLPDAVILNTFDDLERPALDAMRAVLPPPVYAVGPLHLHVRRAVPTGSPLHGVGSNLWKEQDGLLEWLDGHRPSSVVYVSYGSIAVMTSEQLLEFAWGLADSGYAFVWVVRPDLVKGGEGDAAALPPEFHAAVEGRGVLPAWCPQEKVLEHDAVGVFLTHSGWNSTLESLAAGVPMLSWPFFAEQQTNCRYKRTEWGIGMEIGGNARRGEVAAMIREAMEGKKGREIRRRAQEWKEKAVRVTLPGGPGDTNLDRVIHDVLLSCKDKISRVNGESV

SEQ ID NO: 619 - DNA, 996 bp, Brassica napus
  CDS (1)..(996)
atggcaagactcagcagctttctctttgttctttctctcctttgcgttctccctatttacctctgccaacagagctatggaggcaaactaaaccctggttactacgcacattcatgcccgcaagccggagagatcgtgagatcagttgtagctcaagctgttgctagagagacacgtatggctgcttccttaatgagacttcatttccacgactgtttcgttcagggttgtgatggctctttgcttctagacagcagtgggaggatagtgagtgagaaaagctccaaccctaacagcaaatcagctcgtggattcgaagtagttgaccagatcaaagctcaacttgagaaacaatgccctggaactgtctcttgtgctgatattctaaccctagccgctagagactcctctgttcttactggtggaccaagctggatggtcccattgggaagaagagattcaagaagtgcaagcttgagcggttcgaacaacaacatccctgcaccaaacaacactttccagacaatcctcagcaagtttaatcgtcaaggacttgatgtcaccgaccttgtcgctctctctgggagtcacactattggattctcgagatgcacaagtttcagacagagactatacaatcagtccggaaacggtcgtccagacatgacattggaacaatcattcgctgctaacttgcgacaaaggtgtccaagatctggaggggaccagaatctctcggtgttggacatcgtcagtgcggcgaaattcgacaacagctatttcaagaacttgatagagaacatgggtttgttgaactcggaccaggttctgttcagcagtaatgataaatcgagagatcttgtaaagaagtatgcagaggatcaaggagagtttttcgagcagtttgccgagtcgatgatcaagatgggaaatatctctcccttgaccggttcgagtggtgaaatcagaaaggattgcaggaagataaactcttga

SEQ ID NO: 620 - protein, 331 aa, Brassica napus
MARLSSFLFVLSLLCVLPIYLCQQSYGGKLNPGYYAHSCPQAGEIVRSVVAQAVARETRMAASLMRLHFHDCFVQGCDGSLLLDSSGRIVSEKSSNPNSKSARGFEVVDQIKAQLEKQCPGTVSCADILTLAARDSSVLTGGPSWMVPLGRRDSRSASLSGSNNNIPAPNNTFQTILSKFNRQGLDVTDLVALSGSHTIGFSRCTSFRQRLYNQSGNGRPDMTLEQSFAANLRQRCPRSGGDQNLSVLDIVSAAKFDNSYFKNLIENMGLLNSDQVLFSSNDKSRDLVKKYAEDQGEFFEQFAESMIKMGNISPLTGSSGEIRKDCRKINS

SEQ ID NO: 621 - DNA, 939 bp, Glycine max
  CDS (1)..(939)
atgatgacaccggaatcattggaggagttggaaaaacatgcaatctcgggtcatcatgtgagggggaatagtgaatatgttagacttgccatatcggatgaaccgagggctgttgaaactgaaatgctacagcctctagcagactcaagaatgaaatctttcatgtggtggattaaagtctttttatggtgctttatcattgttgtacttggtcttgttatattgaaatggggagtgccatttacttttgaaaaggtcctttatccaatcatggagtgggaagcaactacctttggccgtccagttcttgcccttgtacttgttgcttctctggctttattcccagtattttttatcccttctggcccttccatgtggttggctgggatgatttttggttatggccttggctttgttataataatgattggaacaaccattgggatggtcctcccttacttaattggactaattttccgtgaccgcattcatcaatggttaaagagatggcccaagaatgctgcaatgattaggcttgctggggaaggaagctggttccatcaatttcaagtagttgctctatttagagtttcaccttttccatataccatattcaactatgctgtagtagtgacaaatatgaggttttggccgtacttatgtggatcaatagcaggaatggtgccagaagctttcatttacatctacagtggtcgattaataaggactttggcagacgcacagtatgggaagcaccaattgaccactgtggaaatcgtgtataacattatttcatttattgttgctgttgttaccaccattgccttcactgtttatgcaaaaaggaccttaaatgaactcaagattgcagaggccaatcaggaagctgcctctgtatctgggagtggtaatcttgagatggagaaaggttcccattga

SEQ ID NO: 622 - protein, 312 aa, Glycine max
MMTPESLEELEKHAISGHHVRGNSEYVRLAISDEPRAVETEMLQPLADSRMKSFMWWIKVFLWCFIIVVLGLVILKWGVPFTFEKVLYPIMEWEATTFGRPVLALVLVASLALFPVFFIPSGPSMWLAGMIFGYGLGFVIIMIGTTIGMVLPYLIGLIFRDRIHQWLKRWPKNAAMIRLAGEGSWFHQFQVVALFRVSPFPYTIFNYAVVVTNMRFWPYLCGSIAGMVPEAFIYIYSGRLIRTLADAQYGKHQLTTVEIVYNIISFIVAVVTTIAFTVYAKRTLNELKIAEANQEAASVSGSGNLEMEKGSH

SEQ ID NO: 623 - DNA, 765 bp, Brassica napus
  CDS (1)..(765)
atggattcttcttcttctactactacttctcgcaactggagatacaatgttttcccgagctttcgtggggaagatgtccgaagctcattcctcagccatcttctcatggagcttgaacgcaacatgatcactacattcatcgaccatggcatcgagagaagccgccctatcggacctgagcttttatcggcaataaaagactctaggatcgcaatcgtcatcttctctaagaactacgcctcgtcaacatggtgtttgaacgaactggtggagatccacaaatgctttaaggatctggatcagatggtcataccgattttttaccatgtggatccctctgaggttagaaagcagactggagaattcggcgagaggtttaaagaaacatgcaaagacaaaacagaaggtgacagagaaaggtggattcgagcacttactgatgtagcaaacttggccggagaggattctaagaattggactggtaaaggcgaagcaaaaatgattgaacatatagcaaaggatgtgttcaataaacttatgataccatcaaatgattttaatgccattgtggggattgaagctcattttgagaagttgaattcgcttttgtgtttggagtctgaggaggttaagaagttaggaatttgggggccttcaggggtaggtaagagtactataggaagtgctctttttagtctactctctagccgattccacaaacatgctttcttcgtctcttacaagcgtaaaaaaaatgtgggatga

SEQ ID NO: 624 - protein, 254 aa, Brassica napus
MDSSSSTTTSRNWRYNVFPSFRGEDVRSSFLSHLLMELERNMITTFIDHGIERSRPIGPELLSAIKDSRIAIVIFSKNYASSTWCLNELVEIHKCFKDLDQMVIPIFYHVDPSEVRKQTGEFGERFKETCKDKTEGDRERWIRALTDVANLAGEDSKNWTGKGEAKMIEHIAKDVFNKLMIPSNDFNAIVGIEAHFEKLNSLLCLESEEVKKLGIWGPSGVGKSTIGSALFSLLSSRFHKHAFFVSYKRKKNVG

SEQ ID NO: 625 - DNA, 1158 bp, Brassica napus
  CDS (1)..(1158)
atgaaatcaatgaaaagaagatctgggacgattcagggatgttcccaattaggattgagaaaggagaacaagacgaaggtgtgtgggttaacgtcgttgccagttgatgtggttacgaactgtctagttcgtgtatcgagattcgacctggcggccttagctatgacctccaaggcacaccggtctctcgcaacctccccttctctatgggacttgagatggcggatgaagcgcatcgagccatcttactacgtgtgcttgcacatatttccagactccgtcccacggtggttcatcctccacccggtgaaacgtcagctgaaaccgctcctcccgctttggtgtacagaatcaggttcctcttttatagtggtggattggggtatatttatcatcggtggactcgtaaacggcaaacccacatcgaatgtcaccatgttcgattgtttcgagcatgcgtggtacaaaatcccgcccatgacgatggctcgtgctttcgcctcagcaaacgttatcgacggcaagctatacgtgtttggagggtgcggggatgacgttgattcctcaaactgggcagaggtctacaatccccgcacctatacttgggattttgtgcgtgtgcctactacgactcggccaaagaatatcaaacaaagcgtggtgataggcaagaagaaggtttacgtggtggatgaggatcgtcaaatcttctccttctccccaagcaaacttcctcctatgtttgtgtcatgcggaaaaacagattctaaaccaggagacagagacgactggtgtttgatcggaggattcttattttcccgtggtgcccgcgggacgatactgtggtgtttgccagaagagttcgattggaaggaagtcaatggtttggaagagctgcaacaacaacagttggttgaatacgatatcattaaactctccacaaactatgcctccaacattgtcatcttctggaacgctggtgctactgagagtttggagctttggtctgcggagatttccctaacgaaaatcgaggcaagccagggactagagattcgggggaagatcgagtggtccggttctgtctacaaactcgactaccctctctcagaatcaaatagagttaaggtcttgtttgctgctagtgtctttgcctga

SEQ ID NO: 626 - protein, 385 aa, Brassica napus
MKSMKRRSGTIQGCSQLGLRKENKTKVCGLTSLPVDVVTNCLVRVSRFDLAALAMTSKAHRSLATSPSLWDLRWRMKRIEPSYYVCLHIFPDSVPRWFILHPVKRQLKPLLPLWCTESGSSFIVVDWGIFIIGGLVNGKPTSNVTMFDCFEHAWYKIPPMTMARAFASANVIDGKLYVFGGCGDDVDSSNWAEVYNPRTYTWDFVRVPTTTRPKNIKQSVVIGKKKVYVVDEDRQIFSFSPSKLPPMFVSCGKTDSKPGDRDDWCLIGGFLFSRGARGTILWCLPEEFDWKEVNGLEELQQQQLVEYDIIKLSTNYASNIVIFWNAGATESLELWSAEISLTKIEASQGLEIRGKIEWSGSVYKLDYPLSESNRVKVLFAASVFA

SEQ ID NO: 627 - DNA, 1092 bp, Brassica napus
  CDS (1)..(1092)
atgacgacacagtctccggagatctcgattttgtctcttccttacgatttgctactgaattgcctagcgcgcgtctctagattgtactacccaactctctccctcgtctccaaaaagttccgatccgtcgttgcctcgccggatctttacgaggctcgctccctcttacaccgcacagagagttgcctctatctgtgcttacgctatgatcgcgattaccctcgtaatcttgacacgtattggttcgttctctgccgtaaaccaaaccgaaccgtaaccgaccggtcaagcggccatctattcatcccagtcccatctccccaactgcgtcctgcacgatctatgagtctcgtagccgttgggtctaacatctacaggatcggcggggacatgccctcttcttctagagtctgggtccttgattgtcgattcaacacgtggcacagggctccaaggatgcgattgaagcggagctcccctgctgcgagcttaatcgatgggaagatatacgtagcaggagggtgtgaagaccccagttccgtgaattggattgaagtatttgatccaaagacccgaacttggggaaatgtggcgaacccaggcaccgagacacgcccacgagctgaagtcagaagctttggaattggaggaaaattgtacatccgtggtgatgagtatgtggtttatgatcccaaggaagctagttggaacccgataggattgggaatcgatatggcgtttgcggcatcctttaatcactgcgtgataggagacgtcatgttcctttgggacgacgacagagagtttagatggtatgactccaaggcaagttcatggaaaaagttgaatggtgttgaagatctgcctaatttttatgggtattgtaaaatggtggatcatggtgggaagaagatggctttgttgtgggaaggttatttgcgttcggagttcgtggtttggtgtgctgagattgcgctagagatgcgcgatggagatgagatgtgggggattgtcgagtggttagatgtcgtgctttcactcaacgagccgtttcgcttgttcgatgcaaatgttctttctgctacggtttga

SEQ ID NO: 628 - protein, 363 aa, Brassica napus
MTTQSPEISILSLPYDLLLNCLARVSRLYYPTLSLVSKKFRSVVASPDLYEARSLLHRTESCLYLCLRYDRDYPRNLDTYWFVLCRKPNRTVTDRSSGHLFIPVPSPQLRPARSMSLVAVGSNIYRIGGDMPSSSRVWVLDCRFNTWHRAPRMRLKRSSPAASLIDGKIYVAGGCEDPSSVNWIEVFDPKTRTWGNVANPGTETRPRAEVRSFGIGGKLYIRGDEYVVYDPKEASWNPIGLGIDMAFAASFNHCVIGDVMFLWDDDREFRWYDSKASSWKKLNGVEDLPNFYGYCKMVDHGGKKMALLWEGYLRSEFVVWCAEIALEMRDGDEMWGIVEWLDVVLSLNEPFRLFDANVLSATV

SEQ ID NO: 629 - DNA, 615 bp, Brassica napus
  CDS (1)..(615)
atgccaaagaataagaaaacagaatggcaagtaggagatcctacaataagcatagtgggagatcaattctgtaatccatacccaatggacctaatggtaaagaggaaagttcaaagtttctcaaaagataattaccaagtgttcgatccaagcggaaacctcctcctacaaattgatggacaagcttgggggattaaccgtaaaagggttatgactgatccagctggtttcacaatcctcacaatgcgccaaaagggaatgacgttgaagaacaaatgggaagtgcatggaggagagagcaaagagagagaagacttgctgttcacggtacatcaatctttagcggtgtcactgaaaacatcggtggatgttttcttggcagagaacaataatgtcaagaagagcaatacttgtgattttcatgcttcaggtggatactcgaatatctcattcaaagttttcaaatcggatgctctcatcgctggggtcacgcataagtttacatggggaagtttctgtaaagggaaatgtaattttagggtgagagtaaatccagaggtggattatgctttcatcattgctttgcttgttatggttgatgacaatgagaattga

SEQ ID NO: 630 - protein, 204 aa, Brassica napus
MPKNKKTEWQVGDPTISIVGDQFCNPYPMDLMVKRKVQSFSKDNYQVFDPSGNLLLQIDGQAWGINRKRVMTDPAGFTILTMRQKGMTLKNKWEVHGGESKEREDLLFTVHQSLAVSLKTSVDVFLAENNNVKKSNTCDFHASGGYSNISFKVFKSDALIAGVTHKFTWGSFCKGKCNFRVRVNPEVDYAFIIALLVMVDDNEN

SEQ ID NO: 631 - DNA, 633 bp, Brassica napus
  CDS (1)..(633)
atgaaaggaggtttgcttgtggacgatgaatttattcacggagaagagacgaacctgactgttcggaaaacttccctctttttctccggagatggtttcactgtttacgactgtaagggctctttggtctttcgcgtggactcttacggtggtcccaacaaccgcgacaccgacgaggttgtcctcatggacgctcacggtcgctgtctcctcaccctccgacgaaagaggccgagtttgcgacggagatgggaggggtatctcggggagagaacagacggtcagaaaccaatcttcggggtgaggagatcctcgatcatcgggaggaacagcgtgacggtggaggtttacgcggagtacgagtgcagcgagtacctcatcgaaggaaatttcgggcagaggagctgcacggtggtggaggcggagacgaggcggaaggtggcggagatacggcgaaaagtggatgcgtcaacgaacgtgatgctcgggaaagacgtattctcgttgaacgtgaaggccgggtttgatggagccttcgcgatgggattggtccttgtgcttgatcagatctacggcgacgattacgttgaggttggtgaggaacaggtgcacccttccgcagtagatctttga

SEQ ID NO: 632 - protein, 210 aa, Brassica napus
MKGGLLVDDEFIHGEETNLTVRKTSLFFSGDGFTVYDCKGSLVFRVDSYGGPNNRDTDEVVLMDAHGRCLLTLRRKRPSLRRRWEGYLGERTDGQKPIFGVRRSSIIGRNSVTVEVYAEYECSEYLIEGNFGQRSCTVVEAETRRKVAEIRRKVDASTNVMLGKDVFSLNVKAGFDGAFAMGLVLVLDQIYGDDYVEVGEEQVHPSAVDL

SEQ ID NO: 633 - DNA, 810 bp, Oryza sativa
  CDS (1)..(810)
atgggatcgctcaccaccaacatcgtcctcgccgtcgccgtggtggcagcgctggtcggcggcgggtcgtgcggcccgcccaaggtgccacccggcccgaacatcacgaccaactacaacgccccgtggctccccgccagggccacctggtacggccagccctacggctccggctccaccgacaatggtggcgcgtgcgggatcaagaacgtcaacctgcctccctacaacggcatgatctcctgcggcaacgtcccaatcttcaaggacggcaggggatgcggctcatgctacgaggtgaagtgtgagcagccggcggcgtgctcgaagcagccggtgacggtgttcatcacggacatgaactacgagcccatctcggcgtaccacttcgacttctccggcaaggcgttcggcgccatggcttgcccggggaaggagaccgagctccgcaaggccggcatcatcgacatgcagttcaggagggtgcgctgcaagtaccccggcggccagaaggtcaccttccacgtcgagaagggctccaaccccaactacctcgccgtgctcgtcaagttcgtcgccgacgacggtgacgtcatccagatggacctccaggaggccggattgccagcgtggaggcccatgaagctgtcgtggggcgccatctggaggatggacaccgccacgccactcaaggcacccttctccattcgcgtcaccaccgagtccggcaagagcctcatcgccaaagacgtcatcccggtcaactggatgccagacgccatctacgtatcaaacgtccagttctattga

SEQ ID NO: 634 - protein, 269 aa, Oryza sativa
MGSLTTNIVLAVAVVAALVGGGSCGPPKVPPGPNITTNYNAPWLPARATWYGQPYGSGSTDNGGACGIKNVNLPPYNGMISCGNVPIFKDGRGCGSCYEVKCEQPAACSKQPVTVFITDMNYEPISAYHFDFSGKAFGAMACPGKETELRKAGIIDMQFRRVRCKYPGGQKVTFHVEKGSNPNYLAVLVKFVADDGDVIQMDLQEAGLPAWRPMKLSWGAIWRMDTATPLKAPFSIRVTTESGKSLIAKDVIPVNWMPDAIYVSNVQFY

SEQ ID NO: 635 - DNA, 783 bp, Oryza sativa
  CDS (1)..(783)
atgcttggttttgcgccggcaccaggccggccgctcttcgtgctcttcggttcctccatcgtccagttcagcttcagcaatggcggatggggcgctgcccttgcagacatctacgctcgcaaggctgatatccttctcagagggtatattggttggaactcaaggcgcgcccttcaagtcattgacaaaatttttcccaaggattcgcccgtgcaaccttctttggtaatagtttactttggtggcaatgattcggttgctgcccattcatccggccttggacctcatgtgccactagaggagtacatagacaacatgagaaagatcgcagaccacctgaagagcttgtctgagaagacccgtgtcatcttcctcagctgcccaccacttaacgaggagacgctccgaaaatcaaccagcactgtcctgagtgagatagtgcggacaaacgaaacttgccgcctatactccgaagcctgtgtatctctatgcaaagagatggacctgaaggtggttgatctttggaatgctatgcagaaacgggacgactgggcgacggcctgcttcacggatgggcttcatctgtctgaagaagggagcaagattgttgtggaagagatcctgaggatcctcaaggaggcagagtgggatccatgcctgcactggaaggcgatgccgacagagtttggggaggactcaccctatgatctcgtctcctccagcggccaatccaccgtcaacccctccgactggaccttccacaggactatccaatgggactga

SEQ ID NO: 636 - protein, 260 aa, Oryza sativa
MLGFAPAPGRPLFVLFGSSIVQFSFSNGGWGAALADIYARKADILLRGYIGWNSRRALQVIDKIFPKDSPVQPSLVIVYFGGNDSVAAHSSGLGPHVPLEEYIDNMRKIADHLKSLSEKTRVIFLSCPPLNEETLRKSTSTVLSEIVRTNETCRLYSEACVSLCKEMDLKVVDLWNAMQKRDDWATACFTDGLHLSEEGSKIVVEEILRILKEAEWDPCLHWKAMPTEFGEDSPYDLVSSSGQSTVNPSDWTFHRTIQWD

SEQ ID NO: 637 - DNA, 1065 bp, Brassica napus
  CDS (1)..(1065)
atgtctctccttcttccccatctcatcatccacctacttctcttgacgatggtcacaggtgaaatcctccgaccaagattctacagcgaaacatgccctgaagctgaatccatcgtgagaaacgaaatgaagaaagccttgatcagagaagccagaagcgtcgcttccgttatgcgtctccagtttcacgactgcttcgttaatgtaaaacacaaccaatccctctctcttcttgatttcttttctctgatagtcttatctattttctctttcaagggatgtgacgggtccgtgttgctcgacgacacaccgaacatgctcggcgagaaactatcactctccaacatcaattcgcttagatctttcgaagtcgtggacgacatcaaagaagctctagagaaagcttgtccatctactgtctcctgtgccgacatcgtcatcatggcttctcgtgacgccgttgctcttacaggaggaccggactgggaagtgaagctcgggaggaaagacagtttaacagcgagtcagaaagactccgacgatataatgccgagcccgagagcaaacgcaacgttcttgatcgatctcttcgaaagattcgatctttctgttagagacatggtggctttgtctggatcacactcgattggtaaaggtcggtgtttttcgatcatgttcaggctttataaccaatccggttctggtaaaccggatccggctctcgaaccggtttacaggaagaagcttaaccagctttgtcctttgggtggagacgagaacgtgaccggggatctagacgcgacgcctcgtgtttttgataatcagtacttcaaagacttggtttcaggtagagggtttcttaactcggatcagactctgtacacgagcagagagacgagagggtatgtgaagaggtttagtgaggatcaaggtgagttctttagagcttttgaagaagggatggtgaagttgggtgatttgcaatctgggagacctggtgaggttaggcttaactgtagggttgttaatacaaggcataatgatgtattattgggtgactcttga

SEQ ID NO: 638 - protein, 354 aa, Brassica napus
MSLLLPHLIIHLLLLTMVTGEILRPRFYSETCPEAESIVRNEMKKALIREARSVASVMRLQFHDCFVNVKHNQSLSLLDFFSLIVLSIFSFKGCDGSVLLDDTPNMLGEKLSLSNINSLRSFEVVDDIKEALEKACPSTVSCADIVIMASRDAVALTGGPDWEVKLGRKDSLTASQKDSDDIMPSPRANATFLIDLFERFDLSVRDMVALSGSHSIGKGRCFSIMFRLYNQSGSGKPDPALEPVYRKKLNQLCPLGGDENVTGDLDATPRVFDNQYFKDLVSGRGFLNSDQTLYTSRETRGYVKRFSEDQGEFFRAFEEGMVKLGDLQSGRPGEVRLNCRVVNTRHNDVLLGDS

SEQ ID NO: 639 - DNA, 984 bp, Brassica napus
  CDS (1)..(984)
atgtcaaattcattggaagagccaatagaagaagatgatacctcggactctgttcctcacttgagggaagataatgaatctgttcgtctagttgttgtaacccatgaagcttcttctcaacctgaaaccgtatctcaatcagaagagatgcacagtagaaacttgttgtggtggtggtttaaagctttgtgtatatgtgcacttactctcttgctcactcttgtcttcgccaaatggggtgttccctttgtattccaaaaggttcttattccgatcttacaatgggaagcaactgcatttggccgtcctatgctcttcattgtcctccttctttccttagccttgttccccgtcttcttgatcccttccggtccatccatgtggttagctgggatgattttcggttacggtctcggttttgtcatcatcatggttggaaccactgttggcatggttcttccttacttaatcggcttaatgtttcgtgaccgcctccatcaatggttaaaaagatggcctcgtcaagcagcggttcttagactagctgcagaaggaagctggttccatcagttcagagtcgtggctatctttaggatctcgccgtttccttacaccatcttcaactacgctatcgttgtgactagcatgaggttctggccttacttgttcggttcaatagcagggatgatacctgaagctttcatctacatttacagtggtaggttgatcagaacattcgctgatgtgcaatacggacatcaacgtttgacaacggtagagattgtgtacaacgtaatctccttgatcattgcggttgtgaccactgtggctttcactgtgtacgctaaaagagctttgagggagctgcaaaacgcagatgctaatgaaagtgaggtaaggaatgaggcgaggtttgagatgaagaacgttgttcaacatgaagatagacatcggggtttgggttcttctcatgcattgccttaa

SEQ ID NO: 640 - protein, 327 aa, Brassica napus
MSNSLEEPIEEDDTSDSVPHLREDNESVRLVVVTHEASSQPETVSQSEEMHSRNLLWWWFKALCICALTLLLTLVFAKWGVPFVFQKVLIPILQWEATAFGRPMLFIVLLLSLALFPVFLIPSGPSMWLAGMIFGYGLGFVIIMVGTTVGMVLPYLIGLMFRDRLHQWLKRWPRQAAVLRLAAEGSWFHQFRVVAIFRISPFPYTIFNYAIVVTSMRFWPYLFGSIAGMIPEAFIYIYSGRLIRTFADVQYGHQRLTTVEIVYNVISLIIAVVTTVAFTVYAKRALRELQNADANESEVRNEARFEMKNVVQHEDRHRGLGSSHALP

SEQ ID NO: 641 - DNA, 1239 bp, Glycine max
  CDS (1)..(1239)
atggcttcatcactcgcaaccatactcgtcgccttgccccaaaccccgcaatgccgtagcaccttccgatccgatccacccaaactatccctaaccctaaaacccaaggccactgttacatgtaaggccaccctgtccactaccctggagactagcatccagcagcagcagcagcaagatgaccaaaaacaaaagcccgtggccgaggtgtggcgcaagatccacggggaggacaactgggccgggcttctggacccgatggacccggttatgcgaggcgagctgacccgctacggcgagatggcccaggcctgctacgacgcattcgacttcgacccgtactccaaatactgcggcagctgcaggttccccttgcccgaattcttcgactccctgggcatgaccaacgtgggctacaccatgacgcggtacctctacgccaccgccaacatcaacctcccgaacttcttccgcaagtcacgctggcctcacaagatgtggagcaagcacgccaactgggcgggcttcatcgccgtctccgacgatgaaaccagcaagcgcctcggccgcagagacatcgttatctcgtggcgaggcaccgtcacccacgtggagtgggtggcggatttgctgaatttcctgaaaccgatctcccctgacattccctgttcagacaggaaagtcaaggtagaggccggtttcttggatctgtacacggacagggagccagggtgcgggtactgtaagtactctgcgagggaacaggttttgggagaggtgaagcggttgatggagaagtatgcggacgaggaggttagtgttacgatagccggacatagccttgggagtgcgatggcgatattgagtgcctttgatattgttgaaactggggtgaatgtggggaaggatgggagaaaagcgcatgtttcggtgttttcgttttcggggccgagggtggggaatgttaggtttaaggagaggttggagggggagcttgggattaaggtgctgagggtgcataatgctcatgacatggtgccacagtcgccggggttgattttcaacgaggattcgccgcagtggttgctgaagctggtggaggggtggtttccgtggtgttacttgcacgttggagaggagttgcagttggaccataagaaatccccgtttctcaaccctgacggggatgcttcctgcgcccataacttggaggctcacttgcacttgctagatgggtga

SEQ ID NO: 642 - protein, 412 aa, Glycine max
MASSLATILVALPQTPQCRSTFRSDPPKLSLTLKPKATVTCKATLSTTLETSIQQQQQQDDQKQKPVAEVWRKIHGEDNWAGLLDPMDPVMRGELTRYGEMAQACYDAFDFDPYSKYCGSCRFPLPEFFDSLGMTNVGYTMTRYLYATANINLPNFFRKSRWPHKMWSKHANWAGFIAVSDDETSKRLGRRDIVISWRGTVTHVEWVADLLNFLKPISPDIPCSDRKVKVEAGFLDLYTDREPGCGYCKYSAREQVLGEVKRLMEKYADEEVSVTIAGHSLGSAMAILSAFDIVETGVNVGKDGRKAHVSVFSFSGPRVGNVRFKERLEGELGIKVLRVHNAHDMVPQSPGLIFNEDSPQWLLKLVEGWFPWCYLHVGEELQLDHKKSPFLNPDGDASCAHNLEAHLHLLDG

SEQ ID NO: 643 - DNA, 1341 bp, Brassica napus
  CDS (1)..(1341)
atgacaaacttctcccgatcaaagtccaccggaactactaagtttccggatgtcaaaacaacccgacccggtccagacatatatgagaatatccaccacgatgactacgactacgaagaagaacatagcactacgagcacagactactacgacgtatccacgccgttgagctcacatgggtcgagatctggacccgggtcgggtcaatacacgatcctcgacatttttgcggcggtgctgaagaagtcgcttgtaatgtcttgtactatggagagaggggatgatgatgtggcggcgtctatggatataggttggcctacggaggttaagcacgttagtcacgttactttcgaccggtttagtggttttctcggtcttccctctgagctcgaaccggaggtccctcctcaagctcctagcgccagtgtgagtgtgtttggagtatcagcaaagtcgatgcaatgctcttacgacaacaggggaaatagcatcccaacgatccttctcaggatgcagaaacgcctttatagtgaaggaggtctcaaagcagaaggaatattccgaataaatccagacaatggcaaagaagagcatgtccgaaagcagctaaaccgcggtgtaataccacgtggaattgatgtccattgcttggcgggtttaataaaggcctggtttagggagctaccaacaggagttcttgatgtgttgacaccagagcaagtgatgaaatgtaacacagaagatgactgtaacaagctcgtgactcttcttcctccggttgaatctgcgcttcttgattgggccatcggtttaatggctgacgttgtggagcatgaacagtttaacaaaatgaatgctcgcaacgtagctatggttttcgcaccaaacatgacccaaatggcagatccattaaccgcattgatccacgcggtacaagtgatgaattttctcaagactttgatcttaatgacccttaaagagagggaaaacgcagatgccaaagcaaggtggatagagaaacaaacatcagatccatcagaagaatgggaacaacaacactctgagatattagcccctgagaaacccaaccataaccctaagttcttgagagtggctactctttgtaggctagaagctgacaatgaagaaaagttttggaacactgagaagagaaacgatcataaagatacaactgaaagtactggaactgttcagaggctgtgtaagcatccattgtttaagtcaagcagatcgacaaagaaacctcttgtaagtaatcacgatgaaggaagaagaggacgggatgcttggggctcacgtctctcttctttgccttggtaa

SEQ ID NO: 644 - protein, 446 aa, Brassica napus
MTNFSRSKSTGTTKFPDVKTTRPGPDIYENIHHDDYDYEEEHSTTSTDYYDVSTPLSSHGSRSGPGSGQYTILDIFAAVLKKSLVMSCTMERGDDDVAASMDIGWPTEVKHVSHVTFDRFSGFLGLPSELEPEVPPQAPSASVSVFGVSAKSMQCSYDNRGNSIPTILLRMQKRLYSEGGLKAEGIFRINPDNGKEEHVRKQLNRGVIPRGIDVHCLAGLIKAWFRELPTGVLDVLTPEQVMKCNTEDDCNKLVTLLPPVESALLDWAIGLMADVVEHEQFNKMNARNVAMVFAPNMTQMADPLTALIHAVQVMNFLKTLILMTLKERENADAKARWIEKQTSDPSEEWEQQHSEILAPEKPNHNPKFLRVATLCRLEADNEEKFWNTEKRNDHKDTTESTGTVQRLCKHPLFKSSRSTKKPLVSNHDEGRRGRDAWGSRLSSLPW

SEQ ID NO: 645 - DNA, 1182 bp, Brassica napus
  CDS (1)..(1182)
atgtcgtccccggtaaagaagaggaagacgataaagaaaccgtctcttaagaagaataaagaaacgccgccgcttgtgctcggtcccacgccggaatcgaccccaaatccttcgcttccagatgatctgctattaagctgctttgcacgcgcctcgagactgtactacccgactctctcgctcgtctccaagagctttgcatctctctttgcttcaccggagctttacaagacccgatcctctttaggccgcaccgagagctgtctctatgtgtgcctaagcttccatcctgacccaacccctcgctggttcaccctctgccggaaacctgatcgaaccatgccgctgaagaagaagccaagtgggtatgctttagctaaactcccaactcctccttctcgctctgcgcactggtctggactcgtgacagttggttcagatatctacaacattggcggacccatagacgaagccaacgagccctcctctagcgtctcaatcctggactgtcggtcaaacacgtggcgcgacggtccaagcatgttggtggagcgggactacccacacgccaatgtgattgatggaaagatatacgtagccggagactctaactctacttctcccgagtggatggaggttttcgacccgaaaacacaaacttgggagcttgtgtctagccctcctgccgagatacgactcctatatgatactataagtacaagcgccgggatcgagggaaaggtacacattttcggatccagtaatggtttggcttacgatacgagggaaggtcgatgggaaagtgcggatatggagatggattcggaatgggtttggtattcctactgtgtggttgagaacgtgatttacgtttataacaacgaagagttcaaatggtatgattctacggtaagactctggaaagttttgaagggtttgaaaggactgcctaagttcccacgttatactgctaggttggcggattttggtgggaagatggctgttttgtggggcaggggtgtgacttccagtggctatgtggacaagattatttggtgcgcagtgattgcgcttgagaggcgcagcgatcaagagatttggggtaaggtcgagtggaaggaaccagtgcttaaagtccccaagtcatgtagcattgaccatgctcttgctgctactgtttga

SEQ ID NO: 646 - protein, 393 aa, Brassica napus
MSSPVKKRKTIKKPSLKKNKETPPLVLGPTPESTPNPSLPDDLLLSCFARASRLYYPTLSLVSKSFASLFASPELYKTRSSLGRTESCLYVCLSFHPDPTPRWFTLCRKPDRTMPLKKKPSGYALAKLPTPPSRSAHWSGLVTVGSDIYNIGGPIDEANEPSSSVSILDCRSNTWRDGPSMLVERDYPHANVIDGKIYVAGDSNSTSPEWMEVFDPKTQTWELVSSPPAEIRLLYDTISTSAGIEGKVHIFGSSNGLAYDTREGRWESADMEMDSEWVWYSYCVVENVIYVYNNEEFKWYDSTVRLWKVLKGLKGLPKFPRYTARLADFGGKMAVLWGRGVTSSGYVDKIIWCAVIALERRSDQEIWGKVEWKEPVLKVPKSCSIDHALAATV

SEQ ID NO: 647 - DNA, 861 bp, Brassica napus
  CDS (1)..(861)
atggagatggatttgattgtcacaccggagaagcagaggaatcgtcatgcagtgaggttggtgaaaactcctgtgagaaggaagttgatagtcgaagatgatgatgatgatcacgagattgcgtctgagaagaaagggcaatcaagaactactggtggtggccttcgccagttcagcgttatggtgtgccacaagttagaagccaagaagatcactacatacaaggaggttgcagatgaaatcatttctgattttgcaacaattaagcataacgcagagaagcctttgaacgagaatgagtataacgagaagaacataaggagaagagtctatgatgcgctcaatgtcttcatggctttggatatcatcgcaagggataaaaaagaaatccggtggaaaggacttcccattacctgcaaaaaggatgtcgaagaagttaagagggatcgaaataaggttatgaatagtgtgcaaaagaaggctgttttccttaaagaattaagagaaaaggtctcaagtcttgagagtcttatgttgagaaatcaggagatggttgtgaagactgaaggcccagcagaaggttttactttacctttaattctacttgagacaaatcctcatgcagttgtcgaaatagagatttctgaagatatgcaacttgttcaccttgacttcaatagcacgccattctcggtccatgacgatgcatacatactgaaactgatgcaagaacacaagctgcagcaaaacagagcttcttcttcttcctctacacatcatcaatctcaacattcttcttccagttcttgcattgcttctggaacctcaggcccggtttgctggaactcaagatccagctga

SEQ ID NO: 648 - protein, 286 aa, Brassica napus
MEMDLIVTPEKQRNRHAVRLVKTPVRRKLIVEDDDDDHEIASEKKGQSRTTGGGLRQFSVMVCHKLEAKKITTYKEVADEIISDFATIKHNAEKPLNENEYNEKNIRRRVYDALNVFMALDIIARDKKEIRWKGLPITCKKDVEEVKRDRNKVMNSVQKKAVFLKELREKVSSLESLMLRNQEMVVKTEGPAEGFTLPLILLETNPHAVVEIEISEDMQLVHLDFNSTPFSVHDDAYILKLMQEHKLQQNRASSSSSTHHQSQHSSSSSCIASGTSGPVCWNSRSS

SEQ ID NO: 649 - DNA, 1131 bp, Brassica napus
  CDS (1)..(1131)
atgcatcttttaactgttacaaattcctctggctctaacgccgagaagccgccacagaagaagaagaaagtgcatggtccgaggccactgtcgctgttactacttccagatgagttatctctgaactgcttagcacgcgtgccccgatgctaccacccgtcggtttcaatggtctccacaaccatgaggcgtctcatcgcttctccaaagatttacgttgaaaggtcatttctccgccgcacggagaacgtcctctacgtcgcgattcgatcttgcgttacagaaacccctcgatggtacactctcaatctcaaaccttttggacaacaagagtctggagtagttaaccatagtttggttcctgtcccgtcgttccctgcggttcctccctggggaatgtccatcgtcaccgtcggttcggagatttacgtcatcggtggatgcgtcaacgacaagatggtctccactgtgttcgtcatcgactgtccatcttacacacgtcgcttcctccctagaatgaagcaagcacgcgcctgctcagcagcggaaatcgtcggcgggaagttgtacgtgatcggagggtgtaaccctcggtcgtcgaactgggtggaggcttttgatctaaagactcagacatgggagacagtgacggttgtgcataacttggaggtgtatgagaaaatgatcaggagtttcgtgatggatggtaagatttgcatcatggatcgaaagagtagctttgcttacgatccgaaagaaggaaggttggagagggacccgttgttgaacggacagtggagtgtgggttcttgcgttattgatgacaagttgtacgcgtttggtcggaggaatacgataatggagtttgatccagtggcgaggttttggagtcaagtgaggggtcttgaagatcttcctgataagactgaaggttctaaaatggtgaattatggtggcaaacttgttattttggttaaccttcaacggcgttcgacggagatttggtatacggagattgagttggaaaggagggaaggaggagaggtttgggggacggtcttgtggtctaatcgtgtgctggcttttgaagattcatatgttattttacgatctctagctgtgtcattttga

SEQ ID NO: 650 - protein, 376 aa, Brassica napus
MHLLTVTNSSGSNAEKPPQKKKKVHGPRPLSLLLLPDELSLNCLARVPRCYHPSVSMVSTTMRRLIASPKIYVERSFLRRTENVLYVAIRSCVTETPRWYTLNLKPFGQQESGVVNHSLVPVPSFPAVPPWGMSIVTVGSEIYVIGGCVNDKMVSTVFVIDCPSYTRRFLPRMKQARACSAAEIVGGKLYVIGGCNPRSSNWVEAFDLKTQTWETVTVVHNLEVYEKMIRSFVMDGKICIMDRKSSFAYDPKEGRLERDPLLNGQWSVGSCVIDDKLYAFGRRNTIMEFDPVARFWSQVRGLEDLPDKTEGSKMVNYGGKLVILVNLQRRSTEIWYTEIELERREGGEVWGTVLWSNRVLAFEDSYVILRSLAVSF

SEQ ID NO: 651 - DNA, 1197 bp, Brassica napus
  CDS (1)..(1197)
atggagaggttgatcaagggcgattccgtatcgacgaggaggaagaggaagacaacgacgactacgagtattagggagaagaagaagaagaagaagctcacatcatcatcgtcgtcacttccctatgatttgctagtgatgatcgtggcacgcgttccaagatcgtactatcggactttgtcactggtctccaagagcttccgatgtatggtggtttcacctgagctttacaaggttaggtcactcttgggcctcacggagacttgtctctatgtttgcttgaggttcgggtttacttgttataagtggtataccctctcctccaagagtagtggcggctacgttttggctagagtcttaatgcccgatgatgatgattctcctcgtatgatgggtttgtgttattcagatcttgtggcggttggttctgatatctacaacattggcgtagcagataaaaataaaaccatgcccacgtctggggtctcgatccttgattgcaagactcacaggtggcgtaagtctccacgcatgccagtggagctaactgaactttctgccagggtccttgatcgcaagatatatgtactgggacgacgcttccatcatcttgatggttcctggaagagctccttcgaggtattcaacacaaacacccaaacttgggatctcccttcctgtggtggttttgatagcgccagaatcaattttcttattgacggaaagctccacgtggtgactttattcgatggggtgtttgctttcgactcaaagcaatgtagatgggacctggttgaacaatatccaagcacgggtactatgtgctcaggttctttctgcgaggttgataatgttctctactctgtttctaaagacggagctctgacatggtatgactccgacaatacaagctggagagatttgaacggtttggtaggcctacctaagttgcctagtcctcttgatggttatggttcttatgttaaactgacgggttacggtggtggaaagatgatggttttctggaattgcaatttaggtattcaccgcccgtttcaaagggacaccatatattgtgccgagatagcccttgaaagacgcaatggagattgttggggcaaacttgagtggtttgatagtatgcttttagtccttttggaaacccagttcgttaaggttcttgctgtaacgctttga

SEQ ID NO: 652 - protein, 398 aa, Brassica napus
MERLIKGDSVSTRRKRKTTTTTSIREKKKKKKLTSSSSSLPYDLLVMIVARVPRSYYRTLSLVSKSFRCMVVSPELYKVRSLLGLTETCLYVCLRFGFTCYKWYTLSSKSSGGYVLARVLMPDDDDSPRMMGLCYSDLVAVGSDIYNIGVADKNKTMPTSGVSILDCKTHRWRKSPRMPVELTELSARVLDRKIYVLGRRFHHLDGSWKSSFEVFNTNTQTWDLPSCGGFDSARINFLIDGKLHVVTLFDGVFAFDSKQCRWDLVEQYPSTGTMCSGSFCEVDNVLYSVSKDGALTWYDSDNTSWRDLNGLVGLPKLPSPLDGYGSYVKLTGYGGGKMMVFWNCNLGIHRPFQRDTIYCAEIALERRNGDCWGKLEWFDSMLLVLLETQFVKVLAVTL

SEQ ID NO: 653 - DNA, 951 bp, Glycine max
  CDS (1)..(951)
atgggagacgaagaagaggaggaggtgctcggttcgggtcaatcagcctccaccaacagcttgccacctcccgctgatagcacactcctcaaattgaaccatctcgacatacatgctgatgatgctgtatcacacgcttctcttgctgccaagaagaaaaagagaggcggccaacgggctgttggacctgataagagtggaagaggtctccgccaatttagtatgaaagtgtgtgagaaggtagaaagcaggggaagaacaacatacaatgaggtggcagatgagcttgttgccgaattttctgaaccaagcaatagtgaattgccccctgatcagcaacaatatgatgagaaaaacatccgccgaagggtctatgatgctctgaacgttctcatggcaatggatattatttctaaggacaaaaaagaaattcaatggaggggccttcctcgtactactgtgaatgatattgaagaactaaagacagagcgtcttgggctcaggaatagaattgaaaagaaaacagcctatctgcaggagcttgaggagcaattcgtaggtcttcagaaccttattcaacgaaatgagcagttatatagctcaggaaatcctcccagtggaggtgtatctttaccttttattttggtacagacacgtcctcatgcaactgtggaagtggaaatatcagaagatatgcagcttgttcattttgatttcaatagcactccttttgagctgcatgacgacaattatgttctcaaggcaatgaaatttggtgagagaccactggaagataatatgacacataatcttactgatggaggtgaaggttctagcatgtcaggcttgtgtcagccgcaggctcctacaattctaaatgtgtcaaacaggcctccaacatcacctcctctccctggcatactaaaggcaagagttaagcaagagcattaa

SEQ ID NO: 654 - protein, 316 aa, Glycine max
MGDEEEEEVLGSGQSASTNSLPPPADSTLLKLNHLDIHADDAVSHASLAAKKKKRGGQRAVGPDKSGRGLRQFSMKVCEKVESRGRTTYNEVADELVAEFSEPSNSELPPDQQQYDEKNIRRRVYDALNVLMAMDIISKDKKEIQWRGLPRTTVNDIEELKTERLGLRNRIEKKTAYLQELEEQFVGLQNLIQRNEQLYSSGNPPSGGVSLPFILVQTRPHATVEVEISEDMQLVHFDFNSTPFELHDDNYVLKAMKFGERPLEDNMTHNLTDGGEGSSMSGLCQPQAPTILNVSNRPPTSPPLPGILKARVKQEH

SEQ ID NO: 655 - DNA, 513 bp, Brassica napus
  CDS (1)..(513)
atgagaaagttaagagggatcaagattagaagaccgattcaacgaatctcaagatggattcttcggagaatccgactccgacgatccagatacatccggttaggcccgactcaaccggtttgcaaaccaaaagccatcacaaagctcataagctggggacgcagcctcacatcacacagcgccaggtttctcgggtctaagatatcaaactccggatacgcaccgatcggtaatgacccgattcaaagtaaacccgacccggttccgaaaggtcactcggcggtttacgtcggtaagaaagacggcgactttcatagagttttggtgcctattgtgtactttaaccatcctctgttcggtgagcttctgagagaggcagaggaagagtttgggttttgtcaagaaggtgggatcactatcccttgtccttattcggattttaaacgggttcagacccgtattgaatccgggtcgggttttggtaaactgttctggtgccggcgccggcaataa

SEQ ID NO: 656 - protein, 170 aa, Brassica napus
MRKLRGIKIRRPIQRISRWILRRIRLRRSRYIRLGPTQPVCKPKAITKLISWGRSLTSHSARFLGSKISNSGYAPIGNDPIQSKPDPVPKGHSAVYVGKKDGDFHRVLVPIVYFNHPLFGELLREAEEEFGFCQEGGITIPCPYSDFKRVQTRIESGSGFGKLFWCRRRQ

SEQ ID NO: 657 - DNA, 660 bp, Brassica napus
  CDS (1)..(660)
atggaattagttgaagagaagaaggctccaaaagaagaaaagaagatgggagaaagaagagttgtggtggacaaagcttatctatacgatgaagacaaaccacttaccgtctgcaaaacatctctcttccacaccggcgatggtttcaccgcctacgactgtaacggcgatatcatctttagggtcgattcctacggtagagataacgacgagttggtcctcatggacgccaccggaaagtgtctcctcaccgttaaacgcaagagacctactctgcatcagaggtgggaaggttttctcggggagagatcggagggtcagaaaccgatcttcagcgttcggagatcgtcgataatcgggcggtgcacgatggaagtagaagtatacgacggaagcggagaagagtacaccatagacggcgacttctccttacgaagctgtctcatatacgacacggagaagcgaaccgtggctgagatcaaacgcaaagtggacatgtcaacgaacgtgatgcttggacgagatgtgttcgctctcgagaccaaacccggtttcgacggcgctttcgcgatgggtttggtcctcgtgcttgaccagatcaacggtgatgatcccgttgagattggtgatgaacaagtacacccttttgtcgaggattag

SEQ ID NO: 658 - protein, 219 aa, Brassica napus
MELVEEKKAPKEEKKMGERRVVVDKAYLYDEDKPLTVCKTSLFHTGDGFTAYDCNGDIIFRVDSYGRDNDELVLMDATGKCLLTVKRKRPTLHQRWEGFLGERSEGQKPIFSVRRSSIIGRCTMEVEVYDGSGEEYTIDGDFSLRSCLIYDTEKRTVAEIKRKVDMSTNVMLGRDVFALETKPGFDGAFAMGLVLVLDQINGDDPVEIGDEQVHPFVED

SEQ ID NO: 659 - DNA, 963 bp, Glycine max
  CDS (1)..(963)
atggcttcgttttgttctagattgaccatttgtttggctctgtttgtcctcatattggggagtgccaatgcccaactttctacaaacttctactaccattcgtgtccaaacctcttctccactgtgaaatccacagtgcaatctgccatatcaaaggagacccgcatgggtgcttctctcctccgcctgttcttccacgattgctttgtcaatggatgtgatggttcaattctattggatgacacatcaagcttcaccggagagaagaacgcaaaccccaacaggaactctgctcgtggatacgaggtcattgacaacattaaatcagccgtggagaaagcatgtccaggagttgtctcctgcgcagatatccttgccatagctgccagagactctgttcagatccttggaggccctagttggaatgttaaagttggaagaagagacgctagaactgctagccaatctgctgctaacaatggcatccctccacccacttcaaaccttaaccaactcatctcaagattcagcgctcttggactttccaccaaggacttggtcgccttgtccggtggtcacacaattggacaagcaaggtgcacaaacttcagagcccgcatctacaacgagagcaacatagacaccgcatttgcaaggacaaggcaacaaagctgcccaagaacatcagggtcaggggacaataatcttgcaacgcttgatcttcaaactccaaccgaattcgacaactactacttcaagaatcttgttcagaagaagggtctcctccactctgatcagcaactgttcaatggtgggtccaccgactccattgtgcgtggctacagcaccaacccgagctccttctcctctgacttcgccgccgccatgatcaagatgggagacattagtcctctcactggctccaacggagaaatcaggaagaattgtagaaggattaactaa

SEQ ID NO: 660 - protein, 320 aa, Glycine max
MASFCSRLTICLALFVLILGSANAQLSTNFYYHSCPNLFSTVKSTVQSAISKETRMGASLLRLFFHDCFVNGCDGSILLDDTSSFTGEKNANPNRNSARGYEVIDNIKSAVEKACPGVVSCADILAIAARDSVQILGGPSWNVKVGRRDARTASQSAANNGIPPPTSNLNQLISRFSALGLSTKDLVALSGGHTIGQARCTNFRARIYNESNIDTAFARTRQQSCPRTSGSGDNNLATLDLQTPTEFDNYYFKNLVQKKGLLHSDQQLFNGGSTDSIVRGYSTNPSSFSSDFAAAMIKMGDISPLTGSNGEIRKNCRRIN

SEQ ID NO: 661 - DNA, 1512 bp, Glycine max
  CDS (1)..(1512)
atgggcgtttctcgttctcaaaagcctcatgttgtttgtgtgccattcccagcacaaggccacgtgaacccttttatgcaactaagcaaactccttctttgcaccggtttccacataacctttgtgaacaccgagttcaaccacaagcgtttggtgaagtctcttggacaagaatttgtcaagggacaacctcattttcgatttgagaccataccagatgggttgcctccatctgacaaagatgcaacacaaagcattgcagcattgtgtgatgcaactagaaaacattgttatgagccactcaaagagcttgtgaagaagctcaatgcttcacatgaagtgcctttggttacctctatcatctatgatgggctaatgggctttgcagggaaagtggcaagggatttggacatttctgaacaacaattttggacagcctcagcttgtggtttaatgggatacttgcaatttgatgagcttgtcgaaagaggcattattcccttccaagatgaaagtttcactactgatgggtcattggatacaaatctagactggatatctggaatgaaaaatatgcgaatcagagattgtccaagtttcgtgagaactaccactctagatgaaaccagttttatttgctttggtatagaagcaaaaacctgcatgaaatcatcttcaatcataattaacaccatccaagaattggaaagtgaagttctcaatgcccttatggctcagaacccaaatatatataacattggtccacttcaattgttaggaaggcattttcctgataaagacaagggcttcaaggtgagtgggtcaaatctttggaaaaatgactcaaaatgtatccaatggctagaccaatgggaaccttcctcagtcatatatgtgaattatggaagtattactgtgatgtccgaggatcatttgaaagaatttgcttggggactagcaaatagcaatttaccatttttgtggataaaaaggccagatttggtaatgggtgagtccacacaattgccacaagacttcttagatgaggttaaagatagaggatacataacaagttggtgcccccaagagcaagtgctgtctcatccatcagttggggttttcctaactcattgtggctggaattctacactagaaggtataagtgggggtgtccctatgataggttggcctttctttgctgaacaacaaacaaattgcaggtacatatgcacaacttgggggataggttggcctttctttgctgaacaacaaacaaattgcaggtacatatgcacaacttgggggataggaatggatattaaagatgatgtaaaaagggaggaggtgacaacacttgtgaaagaaatgataaccggagaaagggggaaggaaatgagacaaaagtgtctggagtggaaaaagaaagcaatagaagccactgatatgggaggatcatcatataatgatttccatcgattagtgaaggaggttcttcacaatgatgttgtttga

SEQ ID NO: 662 - protein, 503 aa, Glycine max
MGVSRSQKPHVVCVPFPAQGHVNPFMQLSKLLLCTGFHITFVNTEFNHKRLVKSLGQEFVKGQPHFRFETIPDGLPPSDKDATQSIAALCDATRKHCYEPLKELVKKLNASHEVPLVTSIIYDGLMGFAGKVARDLDISEQQFWTASACGLMGYLQFDELVERGIIPFQDESFTTDGSLDTNLDWISGMKNMRIRDCPSFVRTTTLDETSFICFGIEAKTCMKSSSIIINTIQELESEVLNALMAQNPNIYNIGPLQLLGRHFPDKDKGFKVSGSNLWKNDSKCIQWLDQWEPSSVIYVNYGSITVMSEDHLKEFAWGLANSNLPFLWIKRPDLVMGESTQLPQDFLDEVKDRGYITSWCPQEQVLSHPSVGVFLTHCGWNSTLEGISGGVPMIGWPFFAEQQTNCRYICTTWGIGWPFFAEQQTNCRYICTTWGIGMDIKDDVKREEVTTLVKEMITGERGKEMRQKCLEWKKKAIEATDMGGSSYNDFHRLVKEVLHNDVV

SEQ ID NO: 663 - DNA, 798 bp, Brassica napus
  CDS (1)..(798)
atgcagctcctatcgacactctgcttcttgttcttgcagctgctgtcgagaggagacgcatccgcctctcactctaatcgccacagatcagcccctcactggctccccgccaccgccacctggtacggaagtcccgaaggcgacggcagcagcggaggagcatgcggatacgggtcgctggtggacgtgaagccgttcaaggctcgtgttggagcagtgagtccgttgctgttcaagagcggcgaaggctgcggcgcttgctacaaggtcaggtgcctggataagaccatctgctcaaagagagcagtcacaataattgtcacagaccagtcaccgtcaggaccatctgctcgagcaaagcacactcactttgaccttagtggcgccgcattcggccatctgtcaatccccggccattccggcatcatgcgcaaccgcggcctcatctccgtcctctaccgccagacggcatgcaaatacagagagaagaacatagcattccacgtgaacgcaggatcaacagcttattggttatctcttctcattgagtatgaagacggagaaggggacattggctctatgcacattcgtcaagcggggtcgaaggagtggatagcaatgaagcacatatggggagcaaactggtgcatcgtcggaggaccactaaagggaccactctccgttaagctcaccactttgtcaaacaacaaaacgctgtccgcagccgacgtcatccccaaaaaatgggttcccaaagctacttacacctcccgcctcaacttctcccctgtcctctaa

SEQ ID NO: 664 - protein, 265 aa, Brassica napus
MQLLSTLCFLFLQLLSRGDASASHSNRHRSAPHWLPATATWYGSPEGDGSSGGACGYGSLVDVKPFKARVGAVSPLLFKSGEGCGACYKVRCLDKTICSKRAVTIIVTDQSPSGPSARAKHTHFDLSGAAFGHLSIPGHSGIMRNRGLISVLYRQTACKYREKNIAFHVNAGSTAYWLSLLIEYEDGEGDIGSMHIRQAGSKEWIAMKHIWGANWCIVGGPLKGPLSVKLTTLSNNKTLSAADVIPKKWVPKATYTSRLNFSPVL

SEQ ID NO: 665 - DNA, 654 bp, Oryza sativa
  CDS (1)..(654)
atgggcgggcgggtggatcacgagtactcgtacctgttcaagatggtgctgatcggcgacagcggcgtcggcaagtctaatatcctctcccgcttcacccgcaaccacttctccctcgactccaagtccaccatcggcgtcgagttcgccaccaaatccctgcagatggagggcaaaacaataaaggctcagatctgggacacagcaggacaggagagatatcgtgccatcacaagtgcttactaccgtggcgctgttggggctctccttgtttacgacatcacaaagaggcagagcttcgacaatgtccacaggtggcttcgtgagctccgcgaccatgccgactcgagcattgttatcatgatggtcggtaataagtctgatttgattcatctaagggctgtctccgaggatgaaggtaaggcattggctgaaaaggaggggctgttttttcttgagacatcagctatggaggccgtgaatgtggaggaagcctttcagactatcatcacagaggtctatggcattgttaacaggaaagcactggccgccaaagaagcagctgctgcttctgctccgctgccttcccagggtaaaactatcagcattgacagcgctgcaggaaacacaaagagggcatgctgctctgcttga

SEQ ID NO: 666 - protein, 217 aa, Oryza sativa
MGGRVDHEYSYLFKMVLIGDSGVGKSNILSRFTRNHFSLDSKSTIGVEFATKSLQMEGKTIKAQIWDTAGQERYRAITSAYYRGAVGALLVYDITKRQSFDNVHRWLRELRDHADSSIVIMMVGNKSDLIHLRAVSEDEGKALAEKEGLFFLETSAMEAVNVEEAFQTIITEVYGIVNRKALAAKEAAAASAPLPSQGKTISIDSAAGNTKRACCSA

SEQ ID NO: 667 - DNA, 1413 bp, Brassica napus
  CDS (1)..(1413)
atgagttacaaagtcgcaagagcatcgcagtacctcgccatcaccggtggtgggatcaaagacatcaaactcgccaagaagtcgtgggtctttccatggcaatcttgcaccgtcttcgacgtttctccggtcaactacaccttcgaggtccaagccatgagttccgagaaactcccttttgtcatccccgccgtgttcaccatcggtccacgcgtcgatgaccctcacgctctcttgttgtacgccatgcttatgtctcagcacgacaagcactctaaccacgtcaacgagcttgttcagggtgtcatcgaaggagagactcgtgtcctcgtcgcctcaatgaccatggaagaggtcttcaaaggaacaaagcagtttaagaaggaagtgtttgagaaggttcaacttgagttaaaccagtttggtcttgtgatctacaacgctaacgttaagcagctcgttgatgtgcctggacatgagtacttctcttacttgggtcagaagactcagatggaagcagctaaccaagccaagatcgatgtcgccgaggctaagatgaagggagaggtcggtgctaaagaacgtaccggtctcaccatccagaacgcagccaagatcgacgctgagtcgaagatcatcgcaactcagaggctaggagaagggacaaaggaggatatcaaggtgaagaccgaggtccaagtgtttcagaacgagaaggaggctctcgttgctcaggctgatgcagcactcgcgattcagaaggctgctttgaccaaaaactctcgtgtggctgaggttgaagccggcaaggctgttgccatgagggaagctgagcttcagacacaggtcgagaagatgaatgcgttgactcggacggagaagctcaaagccgagttcctcagcaaagccactgtcgagtatgagaccaaggtgcaagaagctaactgggagctgtacgacaagcagaagaaggcagaagctgttctctacgagaagcagaagcaagcggaggctactaaagctgcagctgacgcttccttctatgctaaacagagagatgcggatgggcttgtggccatggccactgctcaagggacttacatcaagactctcctggacgcggttgacaatgactactcggcgatgagggactttttgatgatcaacaatggggtttatcaggatatcgccaagaccaatgctatggccatcagggacttgcagcctaagatcagtgtgtggaaccaaggtggtggtgctggtgttgatcaggggatgggtagtggtggtatgaaggaaattgctggactctacaagatgttgccaccggttcttgatacggtttatgagcagaccgggatgcagccaccggcttggattggtacactacgtggagctgagtccagacagtaa

SEQ ID NO: 668 - protein, 470 aa, Brassica napus
MSYKVARASQYLAITGGGIKDIKLAKKSWVFPWQSCTVFDVSPVNYTFEVQAMSSEKLPFVIPAVFTIGPRVDDPHALLLYAMLMSQHDKHSNHVNELVQGVIEGETRVLVASMTMEEVFKGTKQFKKEVFEKVQLELNQFGLVIYNANVKQLVDVPGHEYFSYLGQKTQMEAANQAKIDVAEAKMKGEVGAKERTGLTIQNAAKIDAESKIIATQRLGEGTKEDIKVKTEVQVFQNEKEALVAQADAALAIQKAALTKNSRVAEVEAGKAVAMREAELQTQVEKMNALTRTEKLKAEFLSKATVEYETKVQEANWELYDKQKKAEAVLYEKQKQAEATKAAADASFYAKQRDADGLVAMATAQGTYIKTLLDAVDNDYSAMRDFLMINNGVYQDIAKTNAMAIRDLQPKISVWNQGGGAGVDQGMGSGGMKEIAGLYKMLPPVLDTVYEQTGMQPPAWIGTLRGAESRQ

SEQ ID NO: 669 - DNA, 1314 bp, Brassica napus
  CDS (1)..(1314)
atggcgaacttggtcttgtcagaatgtggaataagacctctcccgagaatctacgccacacccagatccactcccctctctaccaacaaacccacctccttcaaattcagacaatccccttcttctccccggtttcgtctgaactctcgaaactgggcgttgaatgtaaccacacctctaacagtcgactcctcatcatctcctccaatcgaggaagaacccaaaacgcagagattcgacccaggcgctcctcctccgttcaacctagctgacatcagagcggcgatacctaagcattgctgggttaagaatccatggaagtctatgagttacgtcgtcagagacgtagccatcgtgttcgcactagctgctggagctgcttacctcaacaattggcttgtttggcctctctattggattgctcaaggaaccatgttctgggctctctttgttcttggccatgactgtggacatggaagcttctcaaatgatccgaggttgaacagtgtggtgggtcaccttcttcattcctctattctagtcccttaccatggctggagaattagccacagaactcaccaccagaaccatggacatgttgagaacgatgaatcttggcatcctatgtctgagaaaatctacaagagtttggacaaacccactcggttctttagatttacattgcctctcgtgatgctcgcttaccctttctacttgtgggcaagaagtccagggaagaagggttctcattaccatccagacagcgacttgttccttcctaaagagagaaacgatgttctcacttctaccgcttgttggactgcaatggctgttctgcttgtctgtctcaacttcgtgatgggtccaatgcaaatgctcaaactttatgtcattccttactggataaatgtaatgtggttggactttgtgacttacctgcatcaccatggtcatgaagataagctcccttggtaccgtgggaaggaatggagttacttgagaggaggacttacaacattggaccgggactacggattgatcaacaacatccatcacgacattggaactcatgtgatacatcatcttttccctcagatcccacattatcatctagtagaagcaacagaagcagctaaaccagtattagggaagtattatagggagcctgataagtctggacctttgccattacatttactgggaatcttagcaaaaagtattaaagaagatcattttgtgagcgatgaaggagatgttgtatactatgaagcagaccctaatctctatggagagatcaaggtaacagcagagtaa

SEQ ID NO: 670 - protein, 437 aa, Brassica napus
MANLVLSECGIRPLPRIYATPRSTPLSTNKPTSFKFRQSPSSPRFRLNSRNWALNVTTPLTVDSSSSPPIEEEPKTQRFDPGAPPPFNLADIRAAIPKHCWVKNPWKSMSYVVRDVAIVFALAAGAAYLNNWLVWPLYWIAQGTMFWALFVLGHDCGHGSFSNDPRLNSVVGHLLHSSILVPYHGWRISHRTHHQNHGHVENDESWHPMSEKIYKSLDKPTRFFRFTLPLVMLAYPFYLWARSPGKKGSHYHPDSDLFLPKERNDVLTSTACWTAMAVLLVCLNFVMGPMQMLKLYVIPYWINVMWLDFVTYLHHHGHEDKLPWYRGKEWSYLRGGLTTLDRDYGLINNIHHDIGTHVIHHLFPQIPHYHLVEATEAAKPVLGKYYREPDKSGPLPLHLLGILAKSIKEDHFVSDEGDVVYYEADPNLYGEIKVTAE

SEQ ID NO: 671 - DNA, 921 bp, Oryza sativa
  CDS (1)..(921)
atggcaatggatcgagccatgcgacaatggcaccatctgctgctggtgctctgcttcgtcggatcgagctcgctgctgctggtgagctcgcagacgacgtcggactcgtgcaccgccgcgctcagcctcggcaacctcatctccttcaacaccaccggcctcaactgcttccaagcatggagctcgcagggcttcatcctccggttcgggaaggacgcgtcgtcggcgggaagcaacagcgtgtggaacttcgtgctgtcggcgccggacagcggcgggtacatcgccgtcgggttctcgccgaacgggaagatggtggggggcagcgcggtggccgggtgggccacgccgggcgccgccggcacggcgaggcagtactacctcggcgggacgacgtcgtcgttgtgtccgccggaccaggggaagctgtcgctgtcgcgcggcgcggcggcgcccaccatcgtgtccaagggctccaggctctacctcgcgttccagctctccggccaaccgctcaccaacgtcatctacgccgtcggccccgccggaaccctgccggggcccagcggcctcctcgcgcagcacaaggacatggcagccggcaccatctccctctcgggcggcaccagcggcggcggcggcagcgggacgcccgctaccggcggcggcggtgacggcgacgagggccatgaggaccacgagggcggcggagaagggaagggcaagagtgatcagtcgggcggagtcggcggcgagagcggcagcgacgggaacggcggaaggagcacgacgacgacggcgtcggcgtcaagctctggcagcgcaagcgggagagttttctgtgcccagtggacgaaatgcagcctggtcgttcagatgttggtgtattttgtgcttctctcaggcacggttttcctttaa

SEQ ID NO: 672 - protein, 306 aa, Oryza sativa
MAMDRAMRQWHHLLLVLCFVGSSSLLLVSSQTTSDSCTAALSLGNLISFNTTGLNCFQAWSSQGFILRFGKDASSAGSNSVWNFVLSAPDSGGYIAVGFSPNGKMVGGSAVAGWATPGAAGTARQYYLGGTTSSLCPPDQGKLSLSRGAAAPTIVSKGSRLYLAFQLSGQPLTNVIYAVGPAGTLPGPSGLLAQHKDMAAGTISLSGGTSGGGGSGTPATGGGGDGDEGHEDHEGGGEGKGKSDQSGGVGGESGSDGNGGRSTTTTASASSSGSASGRVFCAQWTKCSLVVQMLVYFVLLSGTVFL

SEQ ID NO: 673 - DNA, 1713 bp, Brassica napus
  CDS (1)..(1713)
atgaagatcggagacttgctgtcggaactgcttctgtctcttccagaagatgtctttactctcatctctcgtttactttcaccatccgacgtttgcaacctaagcctatgctgcaaaactctccgtgaccttgttgattcagagaagatatggcttgtgcagtgcgaagtcgtaaaggttcttcctttatccgaaatagtccaatggcgaacagggatctcttcttacaaggctctttgtcggtttctcgtagaggtaacgaagcctcttgttggggtttgggttcaccagaaccctgaactagggaatgttgtttacgtgatgtctggtttcttgtctgtgattggttgtcggatcattccgcaagaagttggttctttggggatccaagaagggaggcttctgtggtcgcctgtgtttgagatcgtctctggtttcgatggctcggcgaggtttttcctccatgggatagatagagaaagcagttacttgtaccctggtttcgttactagcattgacaagtgttgtaatgtgcttctccttgaggttgagcccaagagacgagagattgagagaacggagaaggttcggtttcctttttgtaagctacctttttgcgatagaaggaagttactatacttggtgacaggccatgtaggtttaccagtgcctgagctatcgttgaaagatgataaagcgacgtcgttggaacgcagaaccatgctgcttaaaagacacaagtttggtgggaactggagtcacatgagcctggaggatgagttttgttacgatccgattcaagtggagataaatgatgagttgtggacgcatcttggttacggtggagattttcgccacgtggacgatgagattcaggtgcaggggacacagaggaagagtttaagcaagtatttcagaattgggatcaagaatatcctgaggaggtctagctcaactggttcgagttcttcttctgcaaagcagcaagcgtcttgtagcagtgagattagacgtttcaatctccaaacgtttcttagctctggtgattttgtaggtcttagtgttaaagcttcaaagattaagctgacttcttaccgaggttggccaagcatgcacgaaactcatttcgctctttataagctaccaattaagatacctgtggaggagaatcaagagtatgctggcttgtggggaggaacctttggctggccacctggaaaatgcactgaagataaacccggtaaggctcttttcttactgatgctcacttatgaaaaatctcaagatggtagtgatagacttcttgtcgggactaaaatactagaaggcactcactatgtgatgcatcctaatggatctgcaatgtttgttgtaaagattggttcgcctacttctgagatctttccttttgatgacacaacaaatggagaagaaaaatatggttttgagtgttgctacacaggagaaggtattgcaaagggttatggttttcggtatcctggatacaaaccgggttcacttttcgtgacatctaaaggtcttctcatgtttgtttggaaagaaactaaaactgtgttgacgttgcaaagacttaaccttgaagagctcttgaagaaaggcgtgtgtgtatcgcctttgcctccatgtctaaattttacttatctgacaaaatctcacaccaatgtgtttgcctcaggacaaagaacatcatag

SEQ ID NO: 674 - protein, 570 aa, Brassica napus
MKIGDLLSELLLSLPEDVFTLISRLLSPSDVCNLSLCCKTLRDLVDSEKIWLVQCEVVKVLPLSEIVQWRTGISSYKALCRFLVEVTKPLVGVWVHQNPELGNVVYVMSGFLSVIGCRIIPQEVGSLGIQEGRLLWSPVFEIVSGFDGSARFFLHGIDRESSYLYPGFVTSIDKCCNVLLLEVEPKRREIERTEKVRFPFCKLPFCDRRKLLYLVTGHVGLPVPELSLKDDKATSLERRTMLLKRHKFGGNWSHMSLEDEFCYDPIQVEINDELWTHLGYGGDFRHVDDEIQVQGTQRKSLSKYFRIGIKNILRRSSSTGSSSSSAKQQASCSSEIRRFNLQTFLSSGDFVGLSVKASKIKLTSYRGWPSMHETHFALYKLPIKIPVEENQEYAGLWGGTFGWPPGKCTEDKPGKALFLLMLTYEKSQDGSDRLLVGTKILEGTHYVMHPNGSAMFVVKIGSPTSEIFPFDDTTNGEEKYGFECCYTGEGIAKGYGFRYPGYKPGSLFVTSKGLLMFVWKETKTVLTLQRLNLEELLKKGVCVSPLPPCLNFTYLTKSHTNVFASGQRTS

SEQ ID NO: 675 - DNA, 375 bp, Glycine max
  CDS (1)..(375)
atgtgttttgctaggagaatcttacgagcattccgacttggtaattataaggatttcttctgtactgcagcagctcaggcatcatatctgcagttctgcattatgatgccttatatcaatgaagttcgtgtgctggctttatcttgcataaattttggtggatacaagcttcatccatatcctctgttggatctttcaaaactcctgttcataaaggaatcagatttagaatccttttgcaatcattgcggtcttgagactggtacagatgaatctggaaataagctacttcccacaaagcaaactacattcagtcatcccaaaactgggttccaaagatatagttttttgggcttgcaagaatatgaaaggtag

SEQ ID NO: 676 - protein, 124 aa, Glycine max
MCFARRILRAFRLGNYKDFFCTAAAQASYLQFCIMMPYINEVRVLALSCINFGGYKLHPYPLLDLSKLLFIKESDLESFCNHCGLETGTDESGNKLLPTKQTTFSHPKTGFQRYSFLGLQEYER

SEQ ID NO: 677 - DNA, 1893 bp, Glycine max
  CDS (1)..(1893)
atgaagtttatgaaacttggatctaagccagattcttttcagagtgaaggggataataatatcaggtatgtcgcagctgagttggcaactgacatagtcattaatgttggaaatgtaaaatttcatctccataagtttcctcttttgtcaaaaagtgcacgcttccaaaagctgattacaaacagtaatgaagagaacaatgatgaagtccatatccatgacattcctggcggatctgctgcttttgaaatatgtaccaagttctgttatggtatgacagtcactcttaatgcatacaatgtcgttgcagctcgctgtgcagcagaatatcttgagatgtacgaaactgttgagaaaggaaatcttatctacaagattgaagtattcctcaactcgagcattttcaggagttggaaagactcgattattgttcttcaaactaccaagtctcttcttaaatggtctgaggaacttaaggtagtgagccatggcattgactccatagctaccaaggcttcacttgatacatcaaaggtggagtggtcatacacctataacaggaaaaagctaccatctgaaaatagtaacgatcctcagtctaataatgcaaggaaacaacaattggttccaaaggactggtggtgggtggaggacctttgtgagctccaacttgatctttatgaacgggttataacagcaattatagaaaaaggcaatgtttctggtgctgtaattggagaagctctaaatgcttatgcctcaagaaggatgcctggcttcaacaagggtgagatccaaggaggagatattgtaaagaatagattactgttggagaccatactccgaatattacctgtggacatgggcattgcctctttcagtttcttggtgaagttattaagggtagctattcagttggaatgtgaagagttggagagatctgaactgattaggagaataggtatgtgccttgaggaagctaaggtgtctgatttattaatttgtgccccagttggtgatgcaattcttgatgttgatattgtgcaaaggatagtagaagagtttgtagcatgtgatcaacaggttcagacggactccctgttggaagatgaatttcaggagatcagaagccctgggatggtatcagacccttcaaaggctaaggtggcaaaactggtggatggctaccttgctgagattgcatgtgatccaaatttacctgttgcaaaatttgttaatcttgctgaattagtatcaagcttccctagagcatctcatgatggcctttatcgtgccattgacatgtatttaaaggagcatcctggaatcagcaagagcgaaaggaaaagaatatgtaggttgatgaactgcaggagcttatctgcagaggcttgcatgcatgctgtgcagaatgagcggcttcccatgcgtgttgttgtgcaggttctattctttgaacaactgagaactacaacatcttcagggggcaacagcacaccagatcatcctgggtctctcaggtcatttcttcctggtggatctcatgggagctctaggtctactataacaaacacagaagaagaatgggatgctgtgggaacaatggaagacataaaatctctgaaaggggaagttgatgcactaaaattatcaggtggaaccggtagggccagcagcggaaaagacaataacagtggtaaaggcaatgccgacaatattgctgccagtaaaatgaaaggtttcatgtcaaagaagatactctctaagatttggtctagcaaagaaaaaagtgttgatataagtagctctgatacgtcagagagccctgcttctactgttgtagaggaaacaaaatctactccagctagaagtaggaggcattcagtatcttag

SEQ ID NO: 678 - protein, 630 aa, Glycine max
MKFMKLGSKPDSFQSEGDNNIRYVAAELATDIVINVGNVKFHLHKFPLLSKSARFQKLITNSNEENNDEVHIHDIPGGSAAFEICTKFCYGMTVTLNAYNVVAARCAAEYLEMYETVEKGNLIYKIEVFLNSSIFRSWKDSIIVLQTTKSLLKWSEELKVVSHGIDSIATKASLDTSKVEWSYTYNRKKLPSENSNDPQSNNARKQQLVPKDWWWVEDLCELQLDLYERVITAIIEKGNVSGAVIGEALNAYASRRMPGFNKGEIQGGDIVKNRLLLETILRILPVDMGIASFSFLVKLLRVAIQLECEELERSELIRRIGMCLEEAKVSDLLICAPVGDAILDVDIVQRIVEEFVACDQQVQTDSLLEDEFQEIRSPGMVSDPSKAKVAKLVDGYLAEIACDPNLPVAKFVNLAELVSSFPRASHDGLYRAIDMYLKEHPGISKSERKRICRLMNCRSLSAEACMHAVQNERLPMRVVVQVLFFEQLRTTTSSGGNSTPDHPGSLRSFLPGGSHGSSRSTITNTEEEWDAVGTMEDIKSLKGEVDALKLSGGTGRASSGKDNNSGKGNADNIAASKMKGFMSKKILSKIWSSKEKSVDISSSDTSESPASTVVEETKSTPARSRRHSVS

SEQ ID NO: 679 - DNA, 1089 bp, Glycine max; identical to SEQ ID NO: 611
  CDS (1)..(1089)

SEQ ID NO: 680 - protein, 362 aa, Glycine max; identical to SEQ ID NO: 612

SEQ ID NO: 681 - DNA, 2535 bp, Glycine max
  CDS (1)..(2535)
atggaggagcggactcgcagcattctgattttgatgaccttgctttccatctccattgctggcggcaatgcaggtggcttgcagcatcataagggtaggcatggtaagcatggtcgtcatatgtctgctcgtaatgtgacttacgacggtaagtcactgttcattaacggaaggcgcgagatccttttttccggctccgtccattacacacgaagcaccccagatatgtggcctgacattcttgacaaagcaaggcgcggaggcttgaacgtcattcaaacttacgttttctggaacgctcacgagccagagcccggcaagttcaacttccaaggcaattatgatcttgtcaagttcattaggctcgttcaagccaaaggcatgtttgtcactctcagggttggtcccttcatccaagccgagtggaaccacggaggtcttccttattggcttagagaggtccctggcatcatattccgctctgacaatgagccctacaagtttcacatgaaagccttcgtgtctaagattatacagatgatgaaggatgagaagctctttgctccccaaggaggtcccatcatcttggctcaaattgagaacgagtacaatcatatccaacttgcatacgaagagaagggagacagttacgtccaatgggctgccaatatggccgtggccaccgatattggtgttccatggctcatgtgcaagcagagggatgcccctgatcccgtcatcaacgcatgcaatggtagacactgtggtgataccttcgcagggccaaacaaaccatacaaaccagccatatggaccgagaattggactgctcagtacagagtacatggagatccaccatcccagagatccgcagaagacatcgcattctcagttgcccgtttcttctccaagaatggaaatttggtcaactactatatgtaccatggtggaacaaactttggcagaacaagctctgtgtttagcacaacccgttattacgatgaggcacctcttgatgaatacggtctgcccagagaaccgaaatggagtcacctgagggacgtgcacaaagctttgctcctttgcaggagggctatccttggtggcgttcccagtgtccaaaagttgaaccattttcacgaggttagaacctttgagagggttggaaccaacatgtgtgctgctttcatcactaacaaccacaccatggagccagccaccattaacttcagaggcacaaactactttttgcctccacattccatcagcatcctccccgattgcaagaccgtggtcttcaacacccaacagattgtttcacagcacaattcaaggaactacgagaggtcacccgcagccaacaatttccactgggagatgttcaatgaggccattccaacggccaagaaaatgccaatcaacctcccagttcccgcagagctttacagcttgcttaaggacaccaccgactatgcttggtacaccaccagcttcgagttgagtcaagaagacatgtcaatgaagcccggggtacttccagtacttcgtgttatgagtctcggacattcaatggttgcattcgtaaacggagacatcgttggaactgctcatggtacccatgaagaaaaatcttttgagttccagacacctgtattgctcagggttggaaccaactatatttccttgttgtctagcactgttggactacccgacagcggagcttacatggaacataggtacgcaggacccaagtccataaacatccttggtctcaacagggggacactagatcttactcgcaatgggtggggtcatcgggttggtctgaaaggtgagggcaagaaagttttcagcgaggaaggatcaacaagtgtaaagtggaaaccacttggtgcagttccgagggctctgagctggtacaggacaagatttggcaccccagagggaacaggccctgttgccataaggatgagtggtatggcgaagggaatggtgtgggtcaacggtaacaacattggtcgctactggatgagttacctctctccacttggaaagcctactcaatcagagtaccacatcccaagatctttcctgaacccacaagacaatttgcttgtgatttttgaagaggaggccagagttccagcacaggttgagatcctaaatgtgaacagagacacaatctgcagcgtagttggagagagggaccctgcgaacgtgaattcatgggtgtctaggaggggcaatttccatcctgtagtgaaatcagttggagcagcagcttcgatggcgtgtgcaactgggaaaaggatagtggcagtggagttcgcaagctttggaaaccccagtggttattgcggagactttgcaatgggaagctgcaatgctgctgccagcaagcaaatcgtggagcgagaatgcttagggcaagaagcttgcacgcttgcattggaccgtgcggtgttcaacaacaatggcgtggatgcttgcccagatttggtgaagcaacttgcagtccaagtgaggtgtgcttag

SEQ ID NO: 682 - protein, 844 aa, Glycine max
MEERTRSILILMTLLSISIAGGNAGGLQHHKGRHGKHGRHMSARNVTYDGKSLFINGRREILFSGSVHYTRSTPDMWPDILDKARRGGLNVIQTYVFWNAHEPEPGKFNFQGNYDLVKFIRLVQAKGMFVTLRVGPFIQAEWNHGGLPYWLREVPGIIFRSDNEPYKFHMKAFVSKIIQMMKDEKLFAPQGGPIILAQIENEYNHIQLAYEEKGDSYVQWAANMAVATDIGVPWLMCKQRDAPDPVINACNGRHCGDTFAGPNKPYKPAIWTENWTAQYRVHGDPPSQRSAEDIAFSVARFFSKNGNLVNYYMYHGGTNFGRTSSVFSTTRYYDEAPLDEYGLPREPKWSHLRDVHKALLLCRRAILGGVPSVQKLNHFHEVRTFERVGTNMCAAFITNNHTMEPATINFRGTNYFLPPHSISILPDCKTVVFNTQQIVSQHNSRNYERSPAANNFHWEMFNEAIPTAKKMPINLPVPAELYSLLKDTTDYAWYTTSFELSQEDMSMKPGVLPVLRVMSLGHSMVAFVNGDIVGTAHGTHEEKSFEFQTPVLLRVGTNYISLLSSTVGLPDSGAYMEHRYAGPKSINILGLNRGTLDLTRNGWGHRVGLKGEGKKVFSEEGSTSVKWKPLGAVPRALSWYRTRFGTPEGTGPVAIRMSGMAKGMVWVNGNNIGRYWMSYLSPLGKPTQSEYHIPRSFLNPQDNLLVIFEEEARVPAQVEILNVNRDTICSVVGERDPANVNSWVSRRGNFHPVVKSVGAAASMACATGKRIVAVEFASFGNPSGYCGDFAMGSCNAAASKQIVERECLGQEACTLALDRAVFNNNGVDACPDLVKQLAVQVRCA

SEQ ID NO: 683 - DNA, 744 bp, Glycine max
  CDS (1)..(744)
atgatgaggtcaaagatagtgttgtttggagactccatcacggagcaatcgatccgagagaatggatggggtgttcctcttgccaatgcctattctcgcagggctgatgtacttgttcgtggttatggtggatacaacactaggtgggctatgttcttactgggccatctcttccctctggactcaactaaaccacctactgctaccacaattttctttggcgctaatgatgcagctttgttaggaagaaccagtgaaaggcaacatgtacctattgaagaattcaaagagaacctcagaaaatttgttcgacacttaaaggattgctcaccaactatggtaattgtgcttattactccacctccacttagtgaggaaggacgcctggcatacgcaagatccgtatatggtgagaatgctactaaaatacctgaaagaacaaatgaagtaactggtcaatatgcaaatgcctgtgttgaggtagcaaaggaaatgggcgtgtggtatatcaatctatggtccaaaatgcaagaaaccgatggctggcaaacaaaatttttgtgggatggattgcacctgacaacagaaggaaatgcagtagtctacgaagaagtgataaatgtgttcaatgaagcagggctttctgctgataacatgccaatggatttccctcaccactcaaaaattgattccaaacatcctgagagagctttccagcagaatgtttgtgatatcccattgtga

SEQ ID NO: 684 - protein, 247 aa, Glycine max
MMRSKIVLFGDSITEQSIRENGWGVPLANAYSRRADVLVRGYGGYNTRWAMFLLGHLFPLDSTKPPTATTIFFGANDAALLGRTSERQHVPIEEFKENLRKFVRHLKDCSPTMVIVLITPPPLSEEGRLAYARSVYGENATKIPERTNEVTGQYANACVEVAKEMGVWYINLWSKMQETDGWQTKFLWDGLHLTTEGNAVVYEEVINVFNEAGLSADNMPMDFPHHSKIDSKHPERAFQQNVCDIPL

SEQ ID NO: 685 - DNA, 423 bp, Glycine max
  CDS (1)..(423)
atggctgcttctgagggaaggccattggtggaggcagtggaacacaaggaggatttctatgagcaccaagagccaagtggatgtgggtatggatgctttcagggttttgggttgagttggtgtagaagccatgaagaaggtaaaggcctggtggagcagaagggcaattcgtggctgagttgcaagttgaggaagataaaggagttttcagaagtgattgcaggccccaagtggaaaacattcatcagaaagataagcgggtatggaaggaagcagcagcagaagaacaggtttcagtatgatgaacacagctatgctctcaacttcaatagtggggataaaagtgaagatgatgacacgccccccagtttctctgctagatttagtgctccttttccctctgctcgtcgccaaactgaataa

SEQ ID NO: 686 - protein, 140 aa, Glycine max
MAASEGRPLVEAVEHKEDFYEHQEPSGCGYGCFQGFGLSWCRSHEEGKGLVEQKGNSWLSCKLRKIKEFSEVIAGPKWKTFIRKISGYGRKQQQKNRFQYDEHSYALNFNSGDKSEDDDTPPSFSARFSAPFPSARRQTE

SEQ ID NO: 687 - DNA, 1272 bp, Brassica napus
  CDS (1)..(1272)
atgatcaaagcttttgcgctagcttcttctgcccatcgcatactttgccccaaatactcatcgaccttctcttcttcccatcacatcctcagattctcaatctccgatcgtcggaccttctcagcaatggccggagctggcggcgacgagttcgttaaaggaaacgtttatccgaatggtgttgctgtcatcactctcgatcgaaccaaagctcttaacgccatgaatctagaaatggatctgaagtataaaagcctccttgacgaatgggaatctgatccaagagtcaaatgtgtcatcattgaaggcagcacacctcgtgccttttgtgctgggatggatattaaaggcgttgctgcagaaatccaaaaggacaaaaacacacctcttgtgcaaaaggtatttacagcagaatataccctgatatgcgcaattgctggttacaaaaaaccatatatctccctaatggatggaataacaatgggatttggccttggcctttctggacatggtcgataccgtgtgataacagagaggacggttcttgccatgccggaaaatggaatcgggttgttcccagatgtcgggttttcatatatagcagctcatagccctgggggaggatctgttggtgcttatcttggtttaactggaaaaagaatctccgcgccgtcggatgcattgttcgttggtcttgggacgcattatgtgccttctgaaaagcttgcttctttaaaagaggctattttgtcagccaacctgtcggcggatcctaatcaagacatccaggcaactttgtcgaaatacagtggcaatactgaatctgaggctcatctcaaatcgcttttgcctcaaatagagtcagcctttagctcaaacaagtctgttaaggaaacaattgaagagctcaaaaactatcagcaaagcactgagcctgcagttgtagaatgggctaaagaggcactcaaaggtttggagaaaggagcaccgttttctctttacctaacgcagaagtacttctcaaatgttgcatgtgccaagggtaaagctgagaacgaattagcgacacttaatggtgtgatgaagactgaatatcgcatcgcactaagatcggccttgcgtggtgattttgctgaaggcgttagagcagtgttgatcgacaaggatcagaatccaaaatggaacccggcaagcgttgaagaggtagacgagaacgaggtggaagctctctttaaaccattaagttcagaagtggaagagttaaaggtctga

SEQ ID NO: 688 - protein, 423 aa, Brassica napus
MIKAFALASSAHRILCPKYSSTFSSSHHILRFSISDRRTFSAMAGAGGDEFVKGNVYPNGVAVITLDRTKALNAMNLEMDLKYKSLLDEWESDPRVKCVIIEGSTPRAFCAGMDIKGVAAEIQKDKNTPLVQKVFTAEYTLICAIAGYKKPYISLMDGITMGFGLGLSGHGRYRVITERTVLAMPENGIGLFPDVGFSYIAAHSPGGGSVGAYLGLTGKRISAPSDALFVGLGTHYVPSEKLASLKEAILSANLSADPNQDIQATLSKYSGNTESEAHLKSLLPQIESAFSSNKSVKETIEELKNYQQSTEPAVVEWAKEALKGLEKGAPFSLYLTQKYFSNVACAKGKAENELATLNGVMKTEYRIALRSALRGDFAEGVRAVLIDKDQNPKWNPASVEEVDENEVEALFKPLSSEVEELKV

SEQ ID NO: 689 - DNA, 879 bp, Brassica napus
  CDS (1)..(879)
atgacgtacagcgatggcgccgatgagacggtgcctgagctgaaactgatcatcgaggatcccgagaatggagattatgtgaaattaagaggaggatctgatgaagaagaggaagaatctccggcgggatgttggatagggtcggtgacgtcagtgtgtttctgggttaaattgatctccctcgtcgcgtgtttgggtttattggcatttgtaattatcaaatggattgctccatttttaatcgaaaaggaattgattccatttataaaatgggtgagaagcacattcagcatcccggtgctcggtcttctcctctttgcctcagttgctttgttcccaagcattcttcttccttcctctccttccatgtggatggctggtctcacctttggttatggaaacgggtttctgttgattctgtcagctgcatcaatcggtgttactcttcctttcttaatcggacatctcttcctccacaagatgcaagaatggttgaagcagtacccgaaaaaagcagccatacttcgagccgcaggtgaaggaacatggttccatcagtttcaagcagtcacgttgatccgcgtctctccgtttccttacatgatttacaactactgcgcattggccactggagttcactacggtccttacatcttaggctctcttgttggaatggttcctgagatctttgtctcaatctacacgggaataatgctaagaacactagctgttgcatcagacaaaagacacggtctttcggccatggagatagtagtgaatgttcttggcttttgtgtaactgcgagcgcgactatagtctgcacaatctatgccaagaagaagcttagtgcgatgcaatcagaggaagtagagacatga

SEQ ID NO: 690 - protein, 292 aa, Brassica napus
MTYSDGADETVPELKLIIEDPENGDYVKLRGGSDEEEEESPAGCWIGSVTSVCFWVKLISLVACLGLLAFVIIKWIAPFLIEKELIPFIKWVRSTFSIPVLGLLLFASVALFPSILLPSSPSMWMAGLTFGYGNGFLLILSAASIGVTLPFLIGHLFLHKMQEWLKQYPKKAAILRAAGEGTWFHQFQAVTLIRVSPFPYMIYNYCALATGVHYGPYILGSLVGMVPEIFVSIYTGIMLRTLAVASDKRHGLSAMEIVVNVLGFCVTASATIVCTIYAKKKLSAMQSEEVET

SEQ ID NO: 691 - DNA, 1290 bp, Brassica napus
  CDS (1)..(1290)
atggcgaacttggtcttatccgaatgtggcataagacctctccccagaatctacaccacacccagatccactttcctctccaacaccaccttcaaactcaaaccatcacctgcgtttcgtctgaatgggttctccactaagaactgggcgttgaatgtcaccacgcctctaacagttgactcatctcctccaacctcagaagaacacgaaacgcagaggttcgacccaggcgcccctcctccgttcaacttagctgatatcagagcagctattcctaagcattgttgggtgaagaacccatggaagtctatgagttatgttgtgagagatgttgccattgtgtttgcattggctgctggagctgcttacctcaacagctggcttgtttggcctctctattggcttgctcaaggaaccatgttctgggctctctttgttcttggccatgactgtggacatggtagcttctcaaatgatccaaggttaaacagtgtggttggtcaccttcttcattcctcaatcctggtcccgtaccatggctggagaattagccacaggactcaccaccagaaccatggacatgttgagaacgatgaatcatggcatcctatgtctgagaaaatcttcaagactttggataaaccaactcggttctttagatttacactgcctctcgtgatgctcgcgtaccctttctacttgtgggcacgaagtccggggaagaagggttctcattaccatccggacagcgacttgttcctccctaaagagaagaatgatgttcttacttctactgcttgttggactgcaatggctgctttgcttgtctgtctcaactttgtgatgggtccaatgcaaatgctcaaactctatggaattccttactggataaatgtaatgtggttggactttgtgacttacctgcatcaccatggtcatgaagataagctcccttggtaccgtgggaaggaatggagttacttgagaggaggacttacaacattggatcgtgactacggagtgatcaataacattcatcacgacattggaactcatgtgatacatcatcttttcccacagatcccacattatcatctagtagaagcaacagaagcagctaaaccagtattagggaagtattacagggagcctaataagtctggacctttgccattacatttacttggaatcttagcaaaaagcatgaaagaagatcattatgtgagcgacgaaggagatgttgtatactataaagcagatcctaatctatatggagaggtcaaagtttaa

SEQ ID NO: 692 - protein, 429 aa, Brassica napus
MANLVLSECGIRPLPRIYTTPRSTFLSNTTFKLKPSPAFRLNGFSTKNWALNVTTPLTVDSSPPTSEEHETQRFDPGAPPPFNLADIRAAIPKHCWVKNPWKSMSYVVRDVAIVFALAAGAAYLNSWLVWPLYWLAQGTMFWALFVLGHDCGHGSFSNDPRLNSVVGHLLHSSILVPYHGWRISHRTHHQNHGHVENDESWHPMSEKIFKTLDKPTRFFRFTLPLVMLAYPFYLWARSPGKKGSHYHPDSDLFLPKEKNDVLTSTACWTAMAALLVCLNFVMGPMQMLKLYGIPYWINVMWLDFVTYLHHHGHEDKLPWYRGKEWSYLRGGLTTLDRDYGVINNIHHDIGTHVIHHLFPQIPHYHLVEATEAAKPVLGKYYREPNKSGPLPLHLLGILAKSMKEDHYVSDEGDVVYYKADPNLYGEVKV

SEQ ID NO: 693 - DNA, 978 bp, Brassica napus
  CDS (1)..(978)
atgtcaaattcattgaaagaggcaagagaggatacctcaggctctgttcgtcacgtgagggaagataatgaatacgttcgccttgttgttgggaccccccgtgaaccttctccggatgaaaccgtgttggtatctcaatcagagatgcggactagaaacttggtttggtggtttaaggctttagggatatgtgcatttactcttttgctcactcttgttttcgccaagtggggtgttccatttgtattccaaaaggttttgattccgattctacaatgggaagcaactgcttttggccgtcctatgctcgccatcgtccttgttgtttccttggctttgttccctgtcttcttgatcccttctggtccttccatgtggctagctgggatgattttcggttatggttttggttttgttatcatcatggttggaaccacggttggtatggttcttccttacttaatcggccttatgtttcgtgatcgcctccatcaatggttgaaaaggtggcctcgtcaagctgctgttcttagattagctgcagaaggaagctggttccaccagttcagagtcgtggcaatctttcgtgtttcgccatttccttacaccattttcaactacgccatcgttgtgacgagcatgaggttctggccttacttgttcggttccatagctggaatgatacctgaagctttcatctacatttacagcggtcgattgatcagaacattcgcggatgtgcaatacggacatcaacgtttgacaacagtagagatagtgtacaacgtaatctccttgatcattgcggttgtgacgactgtagctttcactgtgtacgctaaaagggctttgagagagcttcaaaacgcagaagctaacgaagatgaggaagtccaggttagaaaaccagggagattggagatgaagaacgttgaagataatcataggcgtttgggttcttctcaagcattgccctaa

SEQ ID NO: 694 - protein, 325 aa, Brassica napus
MSNSLKEAREDTSGSVRHVREDNEYVRLVVGTPREPSPDETVLVSQSEMRTRNLVWWFKALGICAFTLLLTLVFAKWGVPFVFQKVLIPILQWEATAFGRPMLAIVLVVSLALFPVFLIPSGPSMWLAGMIFGYGFGFVIIMVGTTVGMVLPYLIGLMFRDRLHQWLKRWPRQAAVLRLAAEGSWFHQFRVVAIFRVSPFPYTIFNYAIVVTSMRFWPYLFGSIAGMIPEAFIYIYSGRLIRTFADVQYGHQRLTTVEIVYNVISLIIAVVTTVAFTVYAKRALRELQNAEANEDEEVQVRKPGRLEMKNVEDNHRRLGSSQALP

SEQ ID NO: 695 - DNA, 1278 bp, Brassica napus
  CDS (1)..(1278)
atggcgattactccgttggctcagctcaacgagttaacgatctcttcctcgtcctcctcatttcacgcgaattcgatatccaattcgttgcatagcagcttcgcgagtacgagaatcagcggcttcacgaaacgaagaagcgattcaaagtccaagtctttgcggctgagatgctccttctctccgatggagaccgcgaagattaaggtcgttggtgtcggcggtggcggtaacaacgccgtcaatcgcatgatttccagcggcttgcagagtgttgatttctatgcgataaacacggactctcaagctctgcttcagtcttctgcacaaacccctcttcaaattggagagcttttaactcgtggccttggtactggtgggaacccgcttctaggagaacaagctgctgaagaatctaaagatgctattgctaatgctctcaaaggatctgaccttgttttcattactgctggtatgggtggtggcactggctctggtgctgctcctgtcgttgctcagatttcaaaggaagctggttatttgactgttggtgttgttacctatccttttagcttcgaaggtcgtaaaagatctttgcaggcgttggaagctattgagaagctgcagaagaacgttgatactcttattgtgattccaaatgatcgtctgctagatattgctgatgagcagacacctcttcaggacgcttttcttcttgcggatgatgttttgcgtcaaggagttcaaggaatctctgatattattactatacctgggctggtcaatgtagattttgcggatgtgaaagcggttatgaaagactctggaactgcaatgcttggggtaggtgtttcctgcggcaagaaccgagcacaagaagcagctgagcaagccactttggctccattgatcggatcatccatacaatcagctactggcgtcgtctacaacatcaccggtggaaaagacattactttgcaggaagtgaaccgagtgtctcaggtggtgacaagtttggcagacccgtcagccaacatcatatttggagctgttgtggatgatcgttacactggagagattcatgtgaccataatagccacgggcttctcgcagtctttccagaagacacttctcagtgacccaagagcagctaaactcgtggacaaaatgggatcatcaggtcagcaagagaacgaaggaatgtctctgcctcaccagaggcagtcttctgcaagtatgaacaccaaaccatcctctccccgtagacttttcttctag

SEQ ID NO: 696 - protein, 425 aa, Brassica napus
MAITPLAQLNELTISSSSSSFHANSISNSLHSSFASTRISGFTKRRSDSKSKSLRLRCSFSPMETAKIKVVGVGGGGNNAVNRMISSGLQSVDFYAINTDSQALLQSSAQTPLQIGELLTRGLGTGGNPLLGEQAAEESKDAIANALKGSDLVFITAGMGGGTGSGAAPVVAQISKEAGYLTVGVVTYPFSFEGRKRSLQALEAIEKLQKNVDTLIVIPNDRLLDIADEQTPLQDAFLLADDVLRQGVQGISDIITIPGLVNVDFADVKAVMKDSGTAMLGVGVSCGKNRAQEAAEQATLAPLIGSSIQSATGVVYNITGGKDITLQEVNRVSQVVTSLADPSANIIFGAVVDDRYTGEIHVTIIATGFSQSFQKTLLSDPRAAKLVDKMGSSGQQENEGMSLPHQRQSSASMNTKPSSPRRLFF

SEQ ID NO: 697 - DNA, 786 bp, Oryza sativa
  CDS (1)..(786)
atggctggggcctctgccaaggtcgtcgcgatgctgctctccgtgctcgccacgtacggcttcgccgccggcgtcgtctacaccaacgactggctcccggccaaggccacctggtacggccagcccaacggcgccggacccgacgacaacggcggtgcgtgcgggttcaagaacaccaaccagtacccgttcatgtccatgacctcctgcggcaacgagcctctgttccaggacggcaagggctgtggcgcctgctaccagatacggtgcaccaacaacccgtcgtgctccgggcagcccaggacggtgatcatcacggacatgaactactaccccgtggccaggtaccacttcgacctgagcggcacggcgttcggcgccatggcgaggccggggctgaacgaccagctccgccacgccggcatcatcgacatccagttcaggcgcgtcccgtgctaccaccgcggcctctacgtgaacttccacgtcgaggccgggtccaacccggtgtacctcgccgtgctggtggagttcgccaacaaggacggcacggtggtgcagctcgacgtcatggagtcgctccccagcggcaagccgacgcgggtctggacgcccatgcgccgctcctggggatccatctggcgcctcgacgccaaccaccgcctccagggccccttctccctccgcatggtcagcgagtccggccagaccgtcatcgcccaccaggtcatcccggccaactggagggccaacaccaactacggctccaaagtccagttccgttga

SEQ ID NO: 698 - protein, 261 aa, Oryza sativa
MAGASAKVVAMLLSVLATYGFAAGVVYTNDWLPAKATWYGQPNGAGPDDNGGACGFKNTNQYPFMSMTSCGNEPLFQDGKGCGACYQIRCTNNPSCSGQPRTVIITDMNYYPVARYHFDLSGTAFGAMARPGLNDQLRHAGIIDIQFRRVPCYHRGLYVNFHVEAGSNPVYLAVLVEFANKDGTVVQLDVMESLPSGKPTRVWTPMRRSWGSIWRLDANHRLQGPFSLRMVSESGQTVIAHQVIPANWRANTNYGSKVQFR

SEQ ID NO: 699 - DNA, 606 bp, Glycine max
  CDS (1)..(606)
atgcaaacccgacaaccttttggacccacgcagatgactccaacaacaactcaagtcatcggatctcagtattgtaaaccgtctcccacctcactggagattgttcgaacggcgaatacgttcgctaatgaattccgtgtctacgaccacaactccgttttcaccctccaaagcgcttccttctccgttcataaacgctgtatcttactccatcaagggaaccccatcgtcacgctacgccgaaagagaatgacagcacataatagatggcaagttttcaggggtaaaagcgaccaaataagggatttgctcttcagtgtaaagcgacccaataaaggatacaacatattccagccaaacacggcactagaattagaagtgttcttagcccaaaatactgaagaaaaagtttgtgagtttaagatagaaggaaattggtccaatggatcttgtgaagtttgttccgttcaacaccgcaatattatagcactgatgaataaacacgctgttcaagccactgggtctgataatttcgtagtcagagtggaagccaatgttgacactgctttcatagttgcattaattgcgattctttgcctagagtag

SEQ ID NO: 700 - protein, 201 aa, Glycine max
MQTRQPFGPTQMTPTTTQVIGSQYCKPSPTSLEIVRTANTFANEFRVYDHNSVFTLQSASFSVHKRCILLHQGNPIVTLRRKRMTAHNRWQVFRGKSDQIRDLLFSVKRPNKGYNIFQPNTALELEVFLAQNTEEKVCEFKIEGNWSNGSCEVCSVQHRNIIALMNKHAVQATGSDNFVVRVEANVDTAFIVALIAILCLE

SEQ ID NO: 701 - DNA, 984 bp, Oryza sativa
  CDS (1)..(984)
atggggtggtcgtcgtcaagggctatgctcgtggcgcgcgctgtggccttggcggtggtgttcctcgcggcggaggctcagctgtcgccggggtactacaacgcgacgtgccccggggtggtgtccatcgtgcgccgcggcatggcgcaggcagtgcagaaggagtcgcgcatgggcgcctccatcctccgcctcttcttccacgactgcttcgtcaacgggtgcgacgcctccatcttgctcgacgacacggcgaacttcaccggggagaagaacgccgggccgaacgccaactcggtgcgcgggtacgaggtcatcgacgccatcaaggcgcagctcgaggcctcctgcaaggccaccgtctcctgcgccgacatcatcacgctcgccgcgcgcgacgccgtcaacctgctcgggggcccgaactggacggtgccgctggggcggcgtgacgcgcgcacgacgagccagagcgcggcgaacaccaacctgccgccgcccggcgcgagcctcgcgtcgctcctgtcgatgttcagcgccaagggcctcgacgcgcgggacctcaccgcgctgtcgggcgcgcacaccgtcgggtgggcgcgctgctccaccttccgcacgcacatctacaacgacaccggcgtgaacgccaccttcgcctcgcagctgcgcaccaagtcctgcccgaccaccggcggcgacggcaacctcgcgccgctcgagctgcaggcgcccaacaccttcgacaacgcctacttcacggacctcctcagccgccgcgtcctgctgcgctccgaccaggagctcttcggcagcggcgccggcaatggcaccacggacgcgttcgtgcgcgcgtacgccgccaacgcgacgacgttcgcggcggacttcgccgccgcgatggtgaggctgggcaacctgagcccgctcaccgggaagaacggcgaggtacggatcaactgccggcgagtgaactcatcatga

SEQ ID NO: 702 - protein, 327 aa, Oryza sativa
MGWSSSRAMLVARAVALAVVFLAAEAQLSPGYYNATCPGVVSIVRRGMAQAVQKESRMGASILRLFFHDCFVNGCDASILLDDTANFTGEKNAGPNANSVRGYEVIDAIKAQLEASCKATVSCADIITLAARDAVNLLGGPNWTVPLGRRDARTTSQSAANTNLPPPGASLASLLSMFSAKGLDARDLTALSGAHTVGWARCSTFRTHIYNDTGVNATFASQLRTKSCPTTGGDGNLAPLELQAPNTFDNAYFTDLLSRRVLLRSDQELFGSGAGNGTTDAFVRAYAANATTFAADFAAAMVRLGNLSPLTGKNGEVRINCRRVNSS

SEQ ID NO: 703 - DNA, 1026 bp, Brassica napus
  CDS (1)..(1026)
atggcggcaaagcttttatccaccggtttccgtcactctactttgccggaaaactatgtccggccactctctgaccgtccacgtctctcccaagtttctcagcttgaagatttccctctcatcgatatatcttcaacagatcgatctcggctcgtccaaaaaatccaccaagcttgcgcccgatttggtttctttcaggttataaatcatggtgttagcaaagcaactatagatgagatggtgagtgttgcgcatgagttttttggcatgcctatggacgaaaaaatgaagctatactcggacgatccaacaaagacaccgagattatcgacgagctttaatgtgaaggaagaagaggttaataattggagagactatctaagacttcattgttatcctatcgacaagtatgtccatgagtggccttccaacccaccttctttcaaggaagttgtgagtaaatacagtagagaaataagagaattgggacttaaaatagaggaattgatatcagagagcttaggtttagaaaaagattacatgaagaaagtgcttggtgaacaaggtcaacacatggcagtcaactattatcctccatgtcctgagcctgagctcacctatggtttacctgctcataccgacccaaatgccctcaccattcttctccaagatgctaccgtttgcggtctccagatcttgatcgacggtcactggtttgctgttaatcctcgtcctgatgcttttgtcatcaacattggtgaccagttgcaggcattgagtaacggagtatacaaaagtgtttggcatcgagcagtgacaaacactgaaaacccgagactatcgatcgcatcatttatgtgtcctgataacggtgctgtcataagcccggcaaagcccctgtgggaagccaaggaggaagaggccaagccaatctacagagactacacttatgcagagtactacaagaagttttggagtaggaatctggaccaagaacattgcctcgaaaactttctaaacgactag

SEQ ID NO: 704 - protein, 341 aa, Brassica napus
MAAKLLSTGFRHSTLPENYVRPLSDRPRLSQVSQLEDFPLIDISSTDRSRLVQKIHQACARFGFFQVINHGVSKATIDEMVSVAHEFFGMPMDEKMKLYSDDPTKTPRLSTSFNVKEEEVNNWRDYLRLHCYPIDKYVHEWPSNPPSFKEVVSKYSREIRELGLKIEELISESLGLEKDYMKKVLGEQGQHMAVNYYPPCPEPELTYGLPAHTDPNALTILLQDATVCGLQILIDGHWFAVNPRPDAFVINIGDQLQALSNGVYKSVWHRAVTNTENPRLSIASFMCPDNGAVISPAKPLWEAKEEEAKPIYRDYTYAEYYKKFWSRNLDQEHCLENFLND

SEQ ID NO: 705 - DNA, 927 bp, Glycine max
  CDS (1)..(927)
atgggtgagaaagatgatggcttgggtttggggttgagtttgaagttaggatggggagaaaataatgataacaataataatcaacaacaacaccctttcaacgtgcacaagcctcctcaatcggttccaaaccaaagggtttccgtcaatagcttgttccattttcatgatcggagctccgagatgcggtcgttcttccgcggaatagacgtgaatttgccaccgcccccgccttcggcggctctggcggcgttcgatgacgagaacggggtgtcctcgccgaacagcacgatatcgagcatcagcgggaagcggagcgagagagagggaaacggagaggagaacgagagaacgtcgagttctcgcggcggcggcggaagcgacgacgatgaaggcggcgcgtgtggtggagacgccgacgccgatgcgtcgaggaagaagctgaggttgtctaaggaacaggccttggtgctggaagaaacattcaaggaacacaatactctgaacccgaagcaaaagcaagctttggcaaagcagttgaatttgatgcctaggcaggtggaggtgtggtttcaaaacagaagagcaaggaccaaattgaagcagactgaagtggattgtgaatatttgaagaggtgctgtgagaatctaactgaagagaataggaggcttcaaaaggaagtgcaagagctcagggcattgaagttatccccacagctttacatgcaaatgaaccctcccaccactctcacaatgtgcccttcatgtgagcgtgttgctgtctcatccgcatcctcttcctcatcggccaccatgccctctgccctgcctccagctaatctcaacccggtgggccctaccatccagcggccaatgcccgtcaacccttgggcagcaatgttgaatcagcaccgtggccggccataa

SEQ ID NO: 706 - protein, 308 aa, Glycine max
MGEKDDGLGLGLSLKLGWGENNDNNNNQQQHPFNVHKPPQSVPNQRVSVNSLFHFHDRSSEMRSFFRGIDVNLPPPPPSAALAAFDDENGVSSPNSTISSISGKRSEREGNGEENERTSSSRGGGGSDDDEGGACGGDADADASRKKLRLSKEQALVLEETFKEHNTLNPKQKQALAKQLNLMPRQVEVWFQNRRARTKLKQTEVDCEYLKRCCENLTEENRRLQKEVQELRALKLSPQLYMQMNPPTTLTMCPSCERVAVSSASSSSSATMPSALPPANLNPVGPTIQRPMPVNPWAAMLNQHRGRP

SEQ ID NO: 707 - DNA, 813 bp, Brassica napus
  CDS (1)..(813)
atgggtcttgatgattcatgcaacacaggtcttgttcttgggttaggcctctcaccgacgcataatagttacaattatgccatcaagaagtcctccgccaccgttgaccaccatgtcaatccgtcgttgacactaagcctctccggtgagagttacaaggtcgaaaagacggtctccggcgccggagatcagatttatcggcagacgtcgtctcacagcggaatctcatcgttctcgagcggaaggatcaagagagaaagagaagtttgtggcgacggcgaagaagaggcggaggaaacggagaaaagagtggtgtgttcgagtgtaagagatgatcatgaagacgaagaaggttttagtgctcgtaaaaagcttagactcactaaacaacaatccgttcttcttgaagaaaacttcaaaatgcatagcactcttaatcccaagcaaaaacaagctcttgcgagacagctgagtctaaggcccaggcaagttgaagtgtggttccaaaacaggagagccaggacaaaactaaagcaaacagatgtggattgtgagtttttgaagaaatgttgcgagactttaacggatgagaacagaaggcttcaaaaagagcttcaagatctcaaggctttaaagatgtctcaacctttttacatgcatatgccgccggcgacgctgatggtgtgtccttcttgtgagagactcggcggtggtgttgctggaggaggccgtggaagtacggtggcggtggatggaggaacggcgaagggagctttctccatcccttttattaatccttctgcagcttgttaa

SEQ ID NO: 708 - protein, 270 aa, Brassica napus
MGLDDSCNTGLVLGLGLSPTHNSYNYAIKKSSATVDHHVNPSLTLSLSGESYKVEKTVSGAGDQIYRQTSSHSGISSFSSGRIKREREVCGDGEEEAEETEKRVVCSSVRDDHEDEEGFSARKKLRLTKQQSVLLEENFKMHSTLNPKQKQALARQLSLRPRQVEVWFQNRRARTKLKQTDVDCEFLKKCCETLTDENRRLQKELQDLKALKMSQPFYMHMPPATLMVCPSCERLGGGVAGGGRGSTVAVDGGTAKGAFSIPFINPSAAC

SEQ ID NO: 709 - DNA, 1395 bp, Zea mays
  CDS (1)..(1395)
atggtgaacggcgagcagcgggcggacgcggagtgcacgcgggcgtcgctgctggggaggtatgagatcgggcggaccctcggcgagggcaacttcggcaaggtgaagtacgcgcgccacatcgccaccggcggccacttcgccatcaagatcctcgaccgcagcaagatcctctccctccgcatcgacgaccagatcaggagggagatcgggacgctcaagctgctcaagcacccgaatgtcgtccgcttgcacgaggttgctgccagtaaaacgaagatctacatggtgcttgagtttgtgaacggcggcgagctcttcgacaagatcgctatcaaggggaaactgtccgaacacgagggcaggaggctcttccagcagctaatcgacggcgtcagctattgccatgacagaggtgtctaccaccgagacctcaagccagagaatgtccttgttgatcggaagggcaccatcaagatctctgacttcggcctcagcgctctacctcaacatctcgggagtgacggacttctgcacacaacatgtggcagccccaactacatagctcctgaggttctgcaaaacagaggctatgacggctccttgtcagatctctggtcttgtggggtcatcctctacgtgatgcttgttggctgccttcccttcgacgacaggaacctcgtcgttctttatcagaagattttcaagggagactgccagatccccaagtggctttcgcctgccgcgcaggaccttctcaagaggatcctccaaccgaatccgatgaagaggatcaacgtcgcggggatcagggagcacgagtggttcaagaaggactacgtgcctgctgttccgcacgatgatgacgaagacgtccttcctagtccagctccctcgataaaggagccaatcgatgagccggcgcaggagaagtgtactcctatcaacgcttttcagttgatcgggatggcctcttcccttgatctttctggtttcttcgaggaagaggatgcagcgcaaagaaagattcggttcacttcgacgcacccacccaaggatctatttgacaagatcgagagcgttgtcatggagatggcattcaaagtccataggggggcaggcaagctcaaggtcttgaagaatagcaagtgttccaggaactccaggaacccgtcatcattgttggtgtgcaccgaggtgtttgagctcggtccatcattatatgtcgtagagcttaggaaatcccacggagactctacgttgtatagacagctgtgcgaaaggctctccgatgagctaggtgcctgcaagacagaccagatcgcgaggactgaatcatcgagtgacgatctttcgagcctcgatggcgaagcgttccctctatctgggttctga

SEQ ID NO: 710 - protein, 464 aa, Zea mays
MVNGEQRADAECTRASLLGRYEIGRTLGEGNFGKVKYARHIATGGHFAIKILDRSKILSLRIDDQIRREIGTLKLLKHPNVVRLHEVAASKTKIYMVLEFVNGGELFDKIAIKGKLSEHEGRRLFQQLIDGVSYCHDRGVYHRDLKPENVLVDRKGTIKISDFGLSALPQHLGSDGLLHTTCGSPNYIAPEVLQNRGYDGSLSDLWSCGVILYVMLVGCLPFDDRNLVVLYQKIFKGDCQIPKWLSPAAQDLLKRILQPNPMKRINVAGIREHEWFKKDYVPAVPHDDDEDVLPSPAPSIKEPIDEPAQEKCTPINAFQLIGMASSLDLSGFFEEEDAAQRKIRFTSTHPPKDLFDKIESVVMEMAFKVHRGAGKLKVLKNSKCSRNSRNPSSLLVCTEVFELGPSLYVVELRKSHGDSTLYRQLCERLSDELGACKTDQIARTESSSDDLSSLDGEAFPLSGF

SEQ ID NO: 711 - DNA, 1158 bp, Brassica napus
  CDS (1)..(1158)
atgtcgcctccagaaaggaagaggaagaagacgaagcagtcactggtgctcggtccgacgccggaatcgactccaattacgtcacttcctgatgatttggtagtgagttgcttagcccgcgtcactcgattgcaatacccaactctctcgctcgtctccaagagctttagatccctccttgcttcgccggagctttacaagacccggtcctctttaggccacaccgagagctgtctctatgtgtgtctaagcttccctacttatcctatcccccgctggttcaccctctgccagaaacctgatcgaaccctaaccaccaacgacaccatgaagttgaagccaagtgggtatgttttagctaaactctcatctccccagtcacgctctgcgcactgttcgggtctcgtgactcttggttcagatatttacaacattggcggacccgtagacgaggaggagccctcgtctagcgtctcaatctttgactgtcgatcccacacatggcgccaaggtccaagcttgctggtgaagcggaagcatccattcgccagtgtacttgatgggaagatatacgtagccggacactctaactctagtttctctgacttgatggaggttttcgacccgaaaacacaaacttgggagcttgtgtctagccctcctgccgagatacgactccaatatgatcatataagtgcaagcgcagggatcgacggaaaggtacacattttccgatcctgtaagggtttggcttacgatacgagggaaggtcgatgggaaagtgtggggacggagatgagttcgggttggctatggcttccttactgcgtggttgagaacgtgctttactattataacgagcgggaagagatcaaatggtatgacactaagggaagacgctggagagttttgaagggtgtgaaaggactgcctaagatctcactttatactgctacattggcggattatggtcggaagatggctgttttgtgggatatggatgtggcttccactggtgataagatgatttggtgcactgtgattgcgctcgaaaggcgcaacgatgaagagatttggggcaaggtcgagtggaaggaagcagtgcttaaagtccccttttcatgtacaattaaacatgctcttgctgctactgtttga

SEQ ID NO: 712 - protein, 385 aa, Brassica napus
MSPPERKRKKTKQSLVLGPTPESTPITSLPDDLVVSCLARVTRLQYPTLSLVSKSFRSLLASPELYKTRSSLGHTESCLYVCLSFPTYPIPRWFTLCQKPDRTLTTNDTMKLKPSGYVLAKLSSPQSRSAHCSGLVTLGSDIYNIGGPVDEEEPSSSVSIFDCRSHTWRQGPSLLVKRKHPFASVLDGKIYVAGHSNSSFSDLMEVFDPKTQTWELVSSPPAEIRLQYDHISASAGIDGKVHIFRSCKGLAYDTREGRWESVGTEMSSGWLWLPYCVVENVLYYYNEREEIKWYDTKGRRWRVLKGVKGLPKISLYTATLADYGRKMAVLWDMDVASTGDKMIWCTVIALERRNDEEIWGKVEWKEAVLKVPFSCTIKHALAATV

SEQ ID NO: 713 - DNA, 1368 bp, Brassica napus
  CDS (1)..(1368)
atgtcgcagagatggagcaggaagaagagccggcttccactagctggtctactcttcatgctcgcactcgccgtcacctttatggttctctacaacgagcgtagcatccagcagatccacctccaccacagcactaatcgcgagcaagatctccgagaagcttccacctttacttctttcgtccatcccaatcttcctcctcggaataatctcgaggttttggatagattcagccgatgcaactcgacgaatgagtacagtggcaagaaaatcggatgggttgaccatatgagtggtcaaggatctgactttgttgctgctgctgcaaaggaggagatttgtgatgtcttccctgggaaatgggtctttgataattcttcttcctcctacccactacacaaggaatctgagtgtccctacatgtctgaccagcttgcttgtcagaagcatgacaggcctgatttggattatcaacactggaggtggcaacctcatcccccctgcaacttgaaaaggtggaatgtgaccgagatgtgggagatgctgaggggaaagagattgatgtttgttggagactccttaaacagaggccaatggatttctatgttctgtctcttacagtctgttatcccgcgtgacaagcaatccatgtctcctaacgctcacctcaccatcttcagggctgaggattacaatgccacggtggaattcctgtgggctccattgctcgtcgaatccaactctgatgacccggtcaatcacaggctggatgaacggatcatccgaccagattcagttctcaaacatgcatcaaagtggcaacatgctgatatcttaatcttcaacacatacttgtggtggaggcaaggtcctgtcaagatccaatggagcagcgaagaaaaaggatcatgcgaggaggtgaatggcgcggagggaatggaaatggctatgaatgcgtgggctcattgggtttccaacaatgtcgatccaaacacaaagcgggtcttcttcgttacaatgtctcctacacatcaatggagccgagagtggaacccgggaagcgagggaaactgctacggggagaagaagccgatacaggaagagacttactggggtagtgggtcggatattccgacaatgaggatggtggagagagtgttgaggggattaggaccaaaggtctcagttatcaacatcacacagttgtctgagtatcgtaaagacggtcatccctcagtgtaccggaaattctgggaacctctaaacgatgacaggttgaaaaatccggcgtcttattcagattgcattcattggtgtgtacctggtgttcctgatgtctggaatcaattgcttttccattttttgtga

SEQ ID NO: 714 - protein, 455 aa, Brassica napus
MSQRWSRKKSRLPLAGLLFMLALAVTFMVLYNERSIQQIHLHHSTNREQDLREASTFTSFVHPNLPPRNNLEVLDRFSRCNSTNEYSGKKIGWVDHMSGQGSDFVAAAAKEEICDVFPGKWVFDNSSSSYPLHKESECPYMSDQLACQKHDRPDLDYQHWRWQPHPPCNLKRWNVTEMWEMLRGKRLMFVGDSLNRGQWISMFCLLQSVIPRDKQSMSPNAHLTIFRAEDYNATVEFLWAPLLVESNSDDPVNHRLDERIIRPDSVLKHASKWQHADILIFNTYLWWRQGPVKIQWSSEEKGSCEEVNGAEGMEMAMNAWAHWVSNNVDPNTKRVFFVTMSPTHQWSREWNPGSEGNCYGEKKPIQEETYWGSGSDIPTMRMVERVLRGLGPKVSVINITQLSEYRKDGHPSVYRKFWEPLNDDRLKNPASYSDCIHWCVPGVPDVWNQLLFHFL

SEQ ID NO: 715 - DNA, 1089 bp, Brassica napus
  CDS (1)..(1089)
atggctgctgctgctataggtgctgcagtctcttatccttcatccaagtcttcttctcttccctccaaaacttccttcgtctcccctcaaaggattttcctcaacaacaagagcacactgtgctacagagaggcgtgtgtatatgggggaagagtgaaggctcaggtatcaacagaggcgccagtgaaagtagccaaggagtcaaagaaacaagaagaaggaatagttgtcaacaaattcaaaccaaaggaaccttacactggtcgatgcctcttgaacaccaggatcactggcgatgacgctcccggtgagacctggcacatcgtcttcaccaccgaaggtgaggttccgtacagagaagggcagtcgataggaataattccagaaggaattgacaagaacgggaagcctcacaagctgaggttatactctatcgccagcagtgccattggtgactttggagactccaaaaccgtttctctctgtgtcaagaggttagtttacactaacgaaagcggagaggttgttaagggagtctgctccaacttcttgtgtgacttgaagcctggtgatgaggcaaagatcactggaccagttggaaaagaaatgcttatgcctaaagatcctaatgccaccatcatcatgcttggaacaggaactggaatagctccattcagatcatttttgtggaaaatgttctttgaggagcatgaggactacaagttcaacggtttggcatggctcttcttgggtgtacccacaagcagctcactgctctacaaggaggagtttgagaagatgaaggagaagaaccctgaaaacttcaggctggactttgcggtgagcagggagcagactaacgacaagggagagaaaatgtacatacagacaagaatggctgagtatgcagaagagctgtgggagttgctgaagaaagacaacacctttgtttacatgtgtggtctcaagggtatggagaagggtatcgatgagatcatggtctcacttgctgctaaagatggtatcgattggttcgagtacaagaagcagttgaagaagagtgagcagtggaatgtggaagtctactaa

SEQ ID NO: 716 - protein, 362 aa, Brassica napus
MAAAAIGAAVSYPSSKSSSLPSKTSFVSPQRIFLNNKSTLCYREACVYGGRVKAQVSTEAPVKVAKESKKQEEGIVVNKFKPKEPYTGRCLLNTRITGDDAPGETWHIVFTTEGEVPYREGQSIGIIPEGIDKNGKPHKLRLYSIASSAIGDFGDSKTVSLCVKRLVYTNESGEVVKGVCSNFLCDLKPGDEAKITGPVGKEMLMPKDPNATIIMLGTGTGIAPFRSFLWKMFFEEHEDYKFNGLAWLFLGVPTSSSLLYKEEFEKMKEKNPENFRLDFAVSREQTNDKGEKMYIQTRMAEYAEELWELLKKDNTFVYMCGLKGMEKGIDEIMVSLAAKDGIDWFEYKKQLKKSEQWNVEVY

SEQ ID NO: 717 - DNA, 726 bp, Glycine max
  CDS (1)..(726)
atgagaccaaagatatttcttttcggcgattcaatcactcaggattcatttgctgaaggtggatggggtgcttctctcgccaaccatttctcccgcacggtagatgtggtgttaagaggttacagtggctacaacacaaggtgggtgttgaaggtgttggagaaggttttcgctgcaacacagcatggtgatggtggaatcaatggagcaccagttgctatcactattttctttggggccaacgatgcttgccttccagatagatacggtgcttttcaacacgtgcctcttcttgagtataagcagaaccttcactctattgtgtccttcttcgtgaagcaatggccaacaacacatgttctccttataacaactcctccaattgatgaagaagcacgtcttagatatccatatgcatacaatccacagggtcttccagagaggacaaatgaagctgctggtgagtatgctacagcatgcattgctgtggctgaagaatgtggagtacctgtgattgatctctggaccaaaatgcagcagtgccctgactggaggaaagaatatctatgtgatggtctgcatctaacccaaagtggcaatcgagttgtttttgaggaggtaatcttgaagctgagagagaaaggcttgagtttagaagctatgccagttgatctccctctactagctgatatcgacccgaatgaccctctgaagtcatttcagtaa

SEQ ID NO: 718 - protein, 241 aa, Glycine max
MRPKIFLFGDSITQDSFAEGGWGASLANHFSRTVDVVLRGYSGYNTRWVLKVLEKVFAATQHGDGGINGAPVAITIFFGANDACLPDRYGAFQHVPLLEYKQNLHSIVSFFVKQWPTTHVLLITTPPIDEEARLRYPYAYNPQGLPERTNEAAGEYATACIAVAEECGVPVIDLWTKMQQCPDWRKEYLCDGLHLTQSGNRVVFEEVILKLREKGLSLEAMPVDLPLLADIDPNDPLKSFQ

SEQ ID NO: 719 - DNA, 1212 bp, Brassica napus
  CDS (1)..(1212)
atgatgatgtccgccggggtagagcaattacgcagaaagaagaggagaagggttgagtctccatcatcatgtgggttaatgtctttgccatatgacatggttctaaacagcctggcccgcgtgtcgagatcggacctaggggccttatgtctggtctcaaagagcatccgctcacgggtgtcttcggcggagatgtacgagacccgatctcgaatgggtttgagggaggagtgcatctatgtatgcttgggaactacttttggcagaaagcctccgggatggttcatcctcagaagaaaagggaatcggctgatcccgatcccgatgccttcgttcccatctccgcgcagagctacctatgtctccatgggatgcgggatctatgtaattggaggaagtatagaagccgtgacgacatcgcgtgtctcgtttctggattgtcggactcacacgtggagccaactcccctccatgagatttgctcgctgtgacgccaaggcaggcgtcttagacggtaagatctacgtcacgggaggctgcgatgatgcattctcccgcgacaatccagaggttttcgatccaaagacgcagacttggagcagtgtgtgtatacctgatccggtgatgaacaataaggtttgcaaggtggttgggccggataatattatttcgttcaaattttggagtgaagaaagtttgtggaatgatttctttttaaacgcaagaggagatgatgatgattgttgtggtggtgcaataatagacagattgttattcagctgtgattttgacggggtaatcaagtggtgtgacccttggagtggggtgaggaaagggagcatggagtggtacaaggtgaatggtttggaacatcttcaagggttcctcaagtttgaccgtaccaacatcaatacaatccttttttatggggagggggcggatgtgtggaattgccatatgctcaagcgcggttacaccgacggcctcctaggcttaattccaggctttaaaatcagcaaatccgctggcaacattgtcatcttctggagcgtgctcgtcggggacaagttgcagttttggtgtgctgagatttcacttgagaggaggcggcgccaggattgccacatttgggggaacatccagtgcattgatcatgtcttcactatggaccctgacctctatgttttgtcttctattaatgttagtctttga

SEQ ID NO: 720 - protein, 403 aa, Brassica napus
MMMSAGVEQLRRKKRRRVESPSSCGLMSLPYDMVLNSLARVSRSDLGALCLVSKSIRSRVSSAEMYETRSRMGLREECIYVCLGTTFGRKPPGWFILRRKGNRLIPIPMPSFPSPRRATYVSMGCGIYVIGGSIEAVTTSRVSFLDCRTHTWSQLPSMRFARCDAKAGVLDGKIYVTGGCDDAFSRDNPEVFDPKTQTWSSVCIPDPVMNNKVCKVVGPDNIISFKFWSEESLWNDFFLNARGDDDDCCGGAIIDRLLFSCDFDGVIKWCDPWSGVRKGSMEWYKVNGLEHLQGFLKFDRTNINTILFYGEGADVWNCHMLKRGYTDGLLGLIPGFKISKSAGNIVIFWSVLVGDKLQFWCAEISLERRRRQDCHIWGNIQCIDHVFTMDPDLYVLSSINVSL

SEQ ID NO: 721 - DNA, 1569 bp, Brassica napus
  CDS (1)..(1569)
atgaaagaggataacaagaagacgatgacgaagcagataacggcgaggcgcgacgacacgccgctacacacggcggtcagagaaggcaaaacagagattctcttagagatgatcggcgaacacgacgacgacggcgcagagctgaaagagctgctggcggagcaaaaccagtcaggtgaaacggctctgtacgttgcggccgagttcggccacaccgacatggtcaagattctgatgaaacactccgactccgtcttagccgcaaccaaagccaaaaacggcttcgacgccttccacatcgccgccaaaaacggcaatctaaaggttcttgatgtgttgatggaggcaaacccagagctctcgtttacattcgattcatccaaaacgacagcgcttcacacggcggcttctcaaggtcacggagagattgtctgtttcctgttggacaaaggtgtggacttagcagctattgcgagaagcaacggtaaaaccgctttgcactctgccgctagaaacgggcacacggagatcgtgaaagagctgattgggaagaaagtgggaatggttacgagagtggacaagaaaggtcaaaccgcgcttcatatggcggttaaaggacagaacgctgagatcgttgacgcgttgatgaaagcagatccttcgttgatcaatgctgctgataataaaggcaacactcctctgcatatcgctgtccgtaaaaacagagcagagattgttcagacggttttacagtacgatgaagtgagtagagtggcggttaacaaatcaggagagacagctcttgacatcgctgagaagaccagccttcacgagattgtatcgcttcttcagaagatcggtatgcagaacgcaagatccatcaaaccagcttcaggctcctctaagaaactgaaagaaacggtcagcgagataggccacgaggtgcatactcagctcgaacaaaccgtgagaactagaagagaaatccaaggaatcggcaaacgcgtcaacaaaatgcacacggaaggactcaacaacgccatcaactccacaaccgtcgtagccattctcatagcaaccgttgcctttggagctatcttcaacgttccaggccaatacacggacgatccgaaaaacgttccttcggggtttacactaggagaggcgagagcagcttcgaggcccgagttcttgatctttgtagtgtttgattctttcgcgctgttcatctctttagctgttgttgtggttcagacatcagtggtagttatagagaggaaagctaagaagcaaatgatggcgataatcaacaagctaatgtggatggcttgcataatgatctcagtggcgttcttatcgctgtctttcgttgttgtgggtgataaggagaggccattggcgattggtataaccgccattggagctttgatcatggtttcaacgcttgggactatgtgttattgggtggttgctaataggattgaagggtctaagtcgtctccagcttcaatgatgtcagatgctgagttggttgatcacaagcataaccggaagctttatgcggtttga

SEQ ID NO: 722 - protein, 522 aa, Brassica napus
MKEDNKKTMTKQITARRDDTPLHTAVREGKTEILLEMIGEHDDDGAELKELLAEQNQSGETALYVAAEFGHTDMVKILMKHSDSVLAATKAKNGFDAFHIAAKNGNLKVLDVLMEANPELSFTFDSSKTTALHTAASQGHGEIVCFLLDKGVDLAAIARSNGKTALHSAARNGHTEIVKELIGKKVGMVTRVDKKGQTALHMAVKGQNAEIVDALMKADPSLINAADNKGNTPLHIAVRKNRAEIVQTVLQYDEVSRVAVNKSGETALDIAEKTSLHEIVSLLQKIGMQNARSIKPASGSSKKLKETVSEIGHEVHTQLEQTVRTRREIQGIGKRVNKMHTEGLNNAINSTTVVAILIATVAFGAIFNVPGQYTDDPKNVPSGFTLGEARAASRPEFLIFVVFDSFALFISLAVVVVQTSVVVIERKAKKQMMAIINKLMWMACIMISVAFLSLSFVVVGDKERPLAIGITAIGALIMVSTLGTMCYWVVANRIEGSKSSPASMMSDAELVDHKHNRKLYAV

SEQ ID NO: 723 - DNA, 702 bp, Brassica napus
  CDS (1)..(702)
atggggcatatagtgatgaccatcttctaccgagtagatccttctcatgttcggaaccagaccggtgattttggtaatattttcgtgcaaacatgtgctggtaaaacagaggaggagaggcgaatgtggagtcaagctttgactgatgtgggcaacattgccggggaagactcccgtaactgggacaacgaatcgaagatgattgaaaagattgttagagatgtctcagacaaactaaatgctacaatgtgggcgaaaaccgggtattccaatggaatggccttcctagtcgtcatcaatttgctcctggagattgcatcagcgggtgcagaccagctctcttcaactcgcaagccttatttctcaaaagtctccttactgatgtcagttctctctcttatcctatccacccttgacttcacttacaaaatccgagcccataaagctcgtttccgattcaagtggcctatgccttggttctactatccatcacgtggctacaacagaatctttggtagttccacagatgctatcttatttttctgtgttgctggtcagttaatagtgtcaacgatcaattgtagctttactgaaagaggacgagacggtcccatcaaagtatcagtctggcctctcttctttgctattggtatggtagtctccaagttcatggagaaaccaaccatttccaaggagagttaa

SEQ ID NO: 724 - protein, 233 aa, Brassica napus
MGHIVMTIFYRVDPSHVRNQTGDFGNIFVQTCAGKTEEERRMWSQALTDVGNIAGEDSRNWDNESKMIEKIVRDVSDKLNATMWAKTGYSNGMAFLVVINLLLEIASAGADQLSSTRKPYFSKVSLLMSVLSLILSTLDFTYKIRAHKARFRFKWPMPWFYYPSRGYNRIFGSSTDAILFFCVAGQLIVSTINCSFTERGRDGPIKVSVWPLFFAIGMVVSKFMEKPTISKES

SEQ ID NO: 725 - DNA, 1518 bp, Brassica napus
  CDS (1)..(1518)
atgacgatcagagagttacggtcggaagaatcagttggtggtacttgtctgcttctctcgcttccagaagatgtgtttgctgctacctctcgttttctatctccaagcgacatttgcaacctaagcttatgctgcaaaagcctctgcgaccttgtggattcagagaagatatggtttgtgcaatgcgagctcgtaaaggctcttcctttatctgaaatagtccggtggcgaatcgggatctcttcttacaaggctctctgtcggtttcttgtggaggtagtgaagcctcttgttggggtttgggttcaccaagaacctgagcttgggaatgttgtctacgtgatgcctggtttcttgtctgttgttggttgtcggatcatcccacaaaaggttggtcctttggggattcaggaagggagggttatgtggtcaccggtgtttgagatcatctgtgatcacgatgatggctccaccaagttcttcctccatggaagaggcagagaaggaagttgcgtgtaccctggttctgttacaggcatcatcgacaagacttgcaatgtgctctcactcgaggttgagccgagtcaagagaagaagagtggggttccatttcagaagcttgatgatagcgatagaagaaacttaatagaatcagtgacaagccatgtaggtcttctacatgaatctgaaccattaaatgtaaagttgtttcccacaaggagagaagatgaagaagggatgttgttggaacgtagaaccatgctccttaaaatgcacaagtttggtaagaaccatgctcctacgcaggtagacataaacgagatgggtgcttccccatgtgtgaatcgccggagatttcttagcgctggtgacacatttggtcttagtctcaaagcttcatacactgagatgtcttcttacaaagggtggccaagaatggatctcaaccgcttttgcctgcacaaactaccaatcaagagtcttggagaggaccaagagtatgctggtttgtggggaggaacgtttgggtggccacctgggagatgtaatgaagataaaaccggacatgctttttatctactgatgctctcttacgaagaatctagaaagaacaatgggaaacgtcttgttgggacgaaaatactcgaaggcaatgactttgtgcagcatcccaatggaacaccaatgtttgttgtggatattgacacaccttcccttgagccctttccgtttgaggcagatggaagagactttcagcattgttacaaaggaaagggtatctcaaatggttatggtttcctttatcctggttcaaaacctggttcactttacgtgatctctggtgatcatctcgcgttcgtttggcatggaactaaagatgtatttactttgaaaagactagaccttgaccagatcatgaagaaaggttttggtttatgggtgcctcctctgcctccaggtaagaactttacttgtatggaaacgtcttacaaaaacgtgtttaccaagtcagtatga

SEQ ID NO: 726 - protein, 505 aa, Brassica napus
MTIRELRSEESVGGTCLLLSLPEDVFAATSRFLSPSDICNLSLCCKSLCDLVDSEKIWFVQCELVKALPLSEIVRWRIGISSYKALCRFLVEVVKPLVGVWVHQEPELGNVVYVMPGFLSVVGCRIIPQKVGPLGIQEGRVMWSPVFEIICDHDDGSTKFFLHGRGREGSCVYPGSVTGIIDKTCNVLSLEVEPSQEKKSGVPFQKLDDSDRRNLIESVTSHVGLLHESEPLNVKLFPTRREDEEGMLLERRTMLLKMHKFGKNHAPTQVDINEMGASPCVNRRRFLSAGDTFGLSLKASYTEMSSYKGWPRMDLNRFCLHKLPIKSLGEDQEYAGLWGGTFGWPPGRCNEDKTGHAFYLLMLSYEESRKNNGKRLVGTKILEGNDFVQHPNGTPMFVVDIDTPSLEPFPFEADGRDFQHCYKGKGISNGYGFLYPGSKPGSLYVISGDHLAFVWHGTKDVFTLKRLDLDQIMKKGFGLWVPPLPPGKNFTCMETSYKNVFTKSV

SEQ ID NO: 727 - DNA, 1515 bp, Brassica napus
  CDS (1)..(1515)
atgaaaggctcgattctcactgttttgtcaatggagaatcatcatcatcatcatcatcacccttcaacgcacttatccatggactctagcggctcgtctcacgaagaactcgatctgggtaaccgccaaatcactctttacaacccaccagacatcaacctccccttgtctgtaggaagaacctccatgtcgtggaacttggattcttgcgataacattttagacgttggcctcagttcgcatgtctacgagaccaccgagacgttcctcaacgtggtggctccgagtaaagtcagtaaaaaatgcttgaaacgaggggatagcatgtggggagcttggttcttcttcagcttctacttcagaccagcgctgaacgataagtcaaagtcaaaggtcgttagagaagctggtaacggaggaggagggtgttttacagggtttgataaatctgatctcaagctcgatgtgtttctcgttcagcatgatatggagaacatgtacatgtgggcttttaaggataagcccgagaacgccctcgggaaaatgcagctgaggagctatatgaacgggcactctcgtcagggcgagcgtccgtttccctttagcgcggagagagggtttgttcggtctcacaggatgcagaggaagcattacagggggctctctaaccctcagtgtcttcacgggatcgagtttgtggcgtcgccgagtctcttgtgtgttagcgaagaagataagaagaggtggatggagctgactggtcgagatttgaagttcactatccctcctgacgctagtgatttcggttcttggagaaaccttcccaacacggagtttgagctgcctcatgttgcgaaaccgggtttgagtaacggcaagaagacccttaatggttcgggattgcatttgacgagcaacgcttctttcagcagcaatggtgactcatcagaaggaggcaacaacagtaagaagaggaaagagttcttatctccgggaagcagcgaagaagaatgttgcttgactgtgaacaacgtcgagacccaccagcctggttgggtaaaggacttcactggagtgatgaagaacgttcacgggcccgcaactgcggccaagaccatctacgaagacgaagaagcttacctggtcgtggttactttaccatttgtggatttgaacagcgtgaaagtctcatggaggaacagcatcacgaacgggatcgtgaaggtcacggggtcaagcacgtcgagggctcctttggtgaagaggagggagcgtactttcaagctggttgatcagacggctgagcattgtcctccaggggagttcatgagggagatacagttgccgaataggataccggaagaagccaacattgaagcgtattttgatgggacaggaccggttctagagatcctggtgccgaagctgaggggaggagtggaggaagaacacgaggttagggtttgtctaaggccacgccacctcggaggggttagtgagcttaagttgacgtga

SEQ ID NO: 728 - protein, 504 aa, Brassica napus
MKGSILTVLSMENHHHHHHHPSTHLSMDSSGSSHEELDLGNRQITLYNPPDINLPLSVGRTSMSWNLDSCDNILDVGLSSHVYETTETFLNVVAPSKVSKKCLKRGDSMWGAWFFFSFYFRPALNDKSKSKVVREAGNGGGGCFTGFDKSDLKLDVFLVQHDMENMYMWAFKDKPENALGKMQLRSYMNGHSRQGERPFPFSAERGFVRSHRMQRKHYRGLSNPQCLHGIEFVASPSLLCVSEEDKKRWMELTGRDLKFTIPPDASDFGSWRNLPNTEFELPHVAKPGLSNGKKTLNGSGLHLTSNASFSSNGDSSEGGNNSKKRKEFLSPGSSEEECCLTVNNVETHQPGWVKDFTGVMKNVHGPATAAKTIYEDEEAYLVVVTLPFVDLNSVKVSWRNSITNGIVKVTGSSTSRAPLVKRRERTFKLVDQTAEHCPPGEFMREIQLPNRIPEEANIEAYFDGTGPVLEILVPKLRGGVEEEHEVRVCLRPRHLGGVSELKLT

SEQ ID NO: 729 - DNA, 1242 bp, Brassica napus
  CDS (1)..(1242)
atggctgcagcaacaccatgggaagagctcttaggctccaagaactgggacactctcctagacccactagaccaatcacttcgccagctcattctccgttgcggcgacttttgtcaagccacttacgactctttcgtcaacgaccaaaactccaagtactgcggagccagccgctacggcaagtcttccttcttcgacaaggtcatgcttgaaaacgcttctgactaccaagtcacgagcttcctctacgccacggctcgtgtctctctccccgaaggcttgcttctccgctctcagtcacgagattcttgggaccgtgagtctaactggttcggttacatcgctgtgacgtctgaggaacggagtaagtccttaggacgccgtgagatctacgtgactttgagagggacgagtaggaactatgagtggatcaatgttttgggagctaggccaacttcagctgacccgttgctgaccggaccggaacagaagggttctggttctaaggtagttgaaactcttagtactcatggtagcgacagtgaagatgaggaagggtgtaaggtgatgctcgggtggctcacaatctacacttctgatcacgctgaatcgaagttcactaagatgagtctacggctacagctgttaactaagatcaaggagcttctcttgaagtataaggacgagaagccgagcattgtgttgactggacatagcttgggagccacagaggctgttctcgccgcttatgacatagctgagaacgcttccggtgatgatgttccggtcactgggatcgtgttcggttgtccacaagtgggtaacaaggagttcaaggacgaagtaacgcgtcacaagaacttgaagatcctccatgtaaggaacactattgatctcttaactagatatcctggaggactcttggggtatgttgatataggaaccaactttgtgatcgacacaaagaagtcaccttacctaaaggactcaaggaatccaggagactggcacaatcttcaggcaatgctccatgtggttgcaggatggaacgggaagaaaggagattttaaactgatggtgaagagaagtattgcattggtgaacaagtcatgtgagttcttgaaagatgagtgtttagtgccaggttcttggtgggtggagaagaacaaagggatgatcaaggatgaaaatggtgagtgggtcattgctccagttgaagaagaaccggaacctgaattctaa

SEQ ID NO: 730 - protein, 413 aa, Brassica napus
MAAATPWEELLGSKNWDTLLDPLDQSLRQLILRCGDFCQATYDSFVNDQNSKYCGASRYGKSSFFDKVMLENASDYQVTSFLYATARVSLPEGLLLRSQSRDSWDRESNWFGYIAVTSEERSKSLGRREIYVTLRGTSRNYEWINVLGARPTSADPLLTGPEQKGSGSKVVETLSTHGSDSEDEEGCKVMLGWLTIYTSDHAESKFTKMSLRLQLLTKIKELLLKYKDEKPSIVLTGHSLGATEAVLAAYDIAENASGDDVPVTGIVFGCPQVGNKEFKDEVTRHKNLKILHVRNTIDLLTRYPGGLLGYVDIGTNFVIDTKKSPYLKDSRNPGDWHNLQAMLHVVAGWNGKKGDFKLMVKRSIALVNKSCEFLKDECLVPGSWWVEKNKGMIKDENGEWVIAPVEEEPEPEF

SEQ ID NO: 731 - DNA, 1089 bp, Brassica napus
  CDS (1)..(1089)
atgggtaaggatttatccagacgtgtcctcacttttctgatattgatctcgttactggcggtggcaatgaaccttctgtccacggtagaggcacagaacaagaagaagccgaggagagatgttcctctagtgaaaggtctctcatggagcttttaccagaaagcatgtccaaaagtggaaagcatcatcaggaaagagctcaagaaagtcttcaagagagacattggtttagccgcagccatccttcgcatacatttccatgactgcttcgttcagggatgtgaagcatcagtgctgctagatggatcagcgagtggaccaggagagcaatcatcgatcccgaatctgacactccgtcaagccgcctttgtcgtcatcaataaccttcgtgccctcgtccacaagcagtgtggtcaagtcgtctcttgctctgacatcctcgctctagccgcccgtgactccgtcgtcctttcaggagggccagactatgctgtaccacttggccgacgcgactcactagcattcgcgagccagaacacaacgttaaacaacttgccgccaccattcgccaacgcgagccagctcatcgccgacttcgccaatagaaacctcgacatcaccgacttggttgcactctccggtggacacaccatcgggatcgcgcattgtccgtctttcacagaccgtctctacccgaaccaagacccaaccatgaacaagtccttcgccaacaaccttaaacgcacttgccccaccgctaactcgagcaacacgcaagtgaatgacataaggagccctgacgtgtttgacaacaagtactacgttgatctcatgaaccgacaagggctgtttacatcagaccaggacctgttcacggacaagaggacacgtggtatcgtggagagctttgccatcgaccaaaagctgttttttgatcattttgtggtggggatgatcaagatgggtcagatgagtgtcttgacggggtcacaaggagagattcgtgcaaactgttccgccagaaacactgaaagtttcatgtctgttttggaagaaggcatactcgaggaggctctttccatgatctag

SEQ ID NO: 732 - protein, 362 aa, Brassica napus
MGKDLSRRVLTFLILISLLAVAMNLLSTVEAQNKKKPRRDVPLVKGLSWSFYQKACPKVESIIRKELKKVFKRDIGLAAAILRIHFHDCFVQGCEASVLLDGSASGPGEQSSIPNLTLRQAAFVVINNLRALVHKQCGQVVSCSDILALAARDSVVLSGGPDYAVPLGRRDSLAFASQNTTLNNLPPPFANASQLIADFANRNLDITDLVALSGGHTIGIAHCPSFTDRLYPNQDPTMNKSFANNLKRTCPTANSSNTQVNDIRSPDVFDNKYYVDLMNRQGLFTSDQDLFTDKRTRGIVESFAIDQKLFFDHFVVGMIKMGQMSVLTGSQGEIRANCSARNTESFMSVLEEGILEEALSMI

SEQ ID NO: 733 - DNA, 1857 bp, Glycine max
  CDS (1)..(1857)
atgatggatcgtggtcaagagaaaaccgtacctgctggctgtgacttgtctctgaagaagaaggagcttctttctagtgccatgaagagaacaagtgaatggattttttctcaggagattccaagtgatgtcaacgttcaagttggggaagcttccttttcgttacataagtttccattagtctccaagtgtggatacattaggaaactcgtctcagaatctaatgacgcagacgtttcattcattgaactccctgaagtacctggtggagcagaagcatttgaactggcagcaaaattctgctacgggataaacttcgacataaacgttgaaaacatcgctacgctgcgctgcgtggctgagtatcttgagatgacagaggactattcagttggaaacttggtgggaagaaccgatgcttacttgaatgaagtggcactcaagaccattgcaggtgctgtgtctattttacatatgtcagagaatctccttccaatagcagagagagcaaagttggtgagtagatgcatagatgccattgcatttatagcatgtaaggaaagccaattctgttcatctgcaagaagtgagagtggttctgtgggagtggtgtcttccatggcatccaaccagagaccagtagttgactggtgggctgaagatttgactgtgcttagaattgacattttccaaagagtcataattgcaatgatggcaagagggtttaaacagtatgccattggcccaattctaatgctctatgcacagaaatctctacgaggtttggatgtattcggaaaggcaaggaagaagattgagccgcgagaagagcatgaaaagagggttgttttagagacaacagtgagccttttgccaagggagaagaatgcaatgtcagtaagctttctttctatgctgcttcgggcagcaatatatcttgagactacagttgcttgcaggcttgacttggagaagaggatggccatgcagttaggacaagctgttttagatgatcttctcattccttcctattctttcactggggacacattgtttgacgtagatacggtgcagaggataatgtctaattacctagaatctcaaacggggagccacttagtcttcaatgcagatgatgaatacttttctcctccacagagtgatatggagcgggttggaaaactaatggaaaactacattgctgaaatagccaccgaccgaaatttaccggttcctaagttcaccagtttggcagaattaattcctgaacagtcaaggccaacagaagatggaatgtatagagccatagacatctttcttaaggctcatcctgctctaagtgacatggacagaaagaaagtttgcagcgtgatggactgtcagaagttatcgcgagaggcatgtgcacatgctgctcaaaatgaccggctacctgtccaaacagtggttcaagttctctattatgaacagcaacggcttcgcgatgccatgaatggcagtggaagtggggaatcttcggttgattccaaattgaacgtatactcaactgatcttcatccagtttcaaatgagctctccaccttacgaagagaaaatgaagacctgaaactagagttagtgaaactgaaaatgagactaaaagagattgaaaattccacgcttaaatcaacagttaatagtcctgttgtaagtgcttcaccttctgctgataagcctcctttgcctcgaagatcattcatgagttcagtgtccaaaaaacttgggaggctttctccttttgtgcgtgccgatggtgtctcgccttttgccaaaggtcgcacaaaaccaaataagaatcgacgccactccatttcctga

SEQ ID NO: 734 - protein, 618 aa, Glycine max
MMDRGQEKTVPAGCDLSLKKKELLSSAMKRTSEWIFSQEIPSDVNVQVGEASFSLHKFPLVSKCGYIRKLVSESNDADVSFIELPEVPGGAEAFELAAKFCYGINFDINVENIATLRCVAEYLEMTEDYSVGNLVGRTDAYLNEVALKTIAGAVSILHMSENLLPIAERAKLVSRCIDAIAFIACKESQFCSSARSESGSVGVVSSMASNQRPVVDWWAEDLTVLRIDIFQRVIIAMMARGFKQYAIGPILMLYAQKSLRGLDVFGKARKKIEPREEHEKRVVLETTVSLLPREKNAMSVSFLSMLLRAAIYLETTVACRLDLEKRMAMQLGQAVLDDLLIPSYSFTGDTLFDVDTVQRIMSNYLESQTGSHLVFNADDEYFSPPQSDMERVGKLMENYIAEIATDRNLPVPKFTSLAELIPEQSRPTEDGMYRAIDIFLKAHPALSDMDRKKVCSVMDCQKLSREACAHAAQNDRLPVQTVVQVLYYEQQRLRDAMNGSGSGESSVDSKLNVYSTDLHPVSNELSTLRRENEDLKLELVKLKMRLKEIENSTLKSTVNSPVVSASPSADKPPLPRRSFMSSVSKKLGRLSPFVRADGVSPFAKGRTKPNKNRRHSIS

SEQ ID NO: 735 - DNA, 1635 bp, Brassica napus
  CDS (1)..(1635)
atgaaagacacttcaagaaccctctcccacactgagctccgagacttcccaggcgggtcccacaccttcgagctcgccatgaagttctgctacggcatcaacttcgagatcaccatctccaacgtggtcgctctccgctgcgcagccggttacctcaagatgacagaggaccacaaagaagagaatctcatcgcacggaccgagacttacctcgagcaggtcgtgtttcgaagcctggagaagtcggtggaagtcctctgctcctgcgagttgttgcttcactctcacgacgtagccgaagcttaccacgtccctgaaaggtgcgtggaggctatagctatgaatgcatgtagagaacagctagtgttgggactatcgcgtctcaacagaaccagccagagaggagactctccaccagagtggtggatccaagacctctctgctcttaggatcgactattacgcacgtgttgtctccgccatggcgagaacaggcttgcggtccgagagtatcatcacttctttaatgcattactctcaggagtctttaaaaggaatcagaaaccgtcaagaacgtaccaagctcgactctggaactattgagaacgagcagaggaacgtagttgaagccatcgttagcctcttccccaacgacaaagtccctctgagtttcctctttgggatgttgagggttggggttactataaacgtttccgtctcttgcaggtttgagcttgagatgagaatcgctcatcagcttgaaagagtctcgctcgatgatctactcatacctgtcgtccgagaggaagagtccatgtacgatgtggagaccgtgcataggatactagtctgtttcttgaagaggatagaggacgaagaacgtaacgaagatgacaacgagactgagagtctgcttgattccaagtgccacagctcgttacttaaagtgggactgatcatagatgcgtacctggcggagatcgcaccagacccgttcctgagtcttaacaagtttacggatttgatagagattttgccggattacgtgcgtgtcacgcatgatggtctctacagagctattgatatgtttcttaaggggcatccgttgctgaccgaacaagaatgcaaaagtctctgcaagttcgtagacacgaagaaacttacacaagaagcatgcagccacgcggctcagaacgatcggttaccggtgcagatggttgttcgagtgctctattcggaacagctgcgtctgaagaacattgtttcaggagagtcaggggaagaagggatggtaatgtcgtctcagaaactcagcagcggggtcccgagcggggcaacttctccgagagacacttacgcatcgttgagaagggagaacaaagagttgaagctggagatctcgagggtgagagtgaggctaagcgagttagagaaggagcaggttttgatgaaacacgggatgattgagaagtcaggtcatggtggaacattgctgacatcactttccaaagggattgggaggatgtctttatttggtggtggagctaaagaagagaagcgacggaaggctaaccgcaaaaacaggcctaggttgaagggcaaaaccggtattaaccgaacagagtctatgttttaa

SEQ ID NO: 736 - protein, 544 aa, Brassica napus
MKDTSRTLSHTELRDFPGGSHTFELAMKFCYGINFEITISNVVALRCAAGYLKMTEDHKEENLIARTETYLEQVVFRSLEKSVEVLCSCELLLHSHDVAEAYHVPERCVEAIAMNACREQLVLGLSRLNRTSQRGDSPPEWWIQDLSALRIDYYARVVSAMARTGLRSESIITSLMHYSQESLKGIRNRQERTKLDSGTIENEQRNVVEAIVSLFPNDKVPLSFLFGMLRVGVTINVSVSCRFELEMRIAHQLERVSLDDLLIPVVREEESMYDVETVHRILVCFLKRIEDEERNEDDNETESLLDSKCHSSLLKVGLIIDAYLAEIAPDPFLSLNKFTDLIEILPDYVRVTHDGLYRAIDMFLKGHPLLTEQECKSLCKFVDTKKLTQEACSHAAQNDRLPVQMVVRVLYSEQLRLKNIVSGESGEEGMVMSSQKLSSGVPSGATSPRDTYASLRRENKELKLEISRVRVRLSELEKEQVLMKHGMIEKSGHGGTLLTSLSKGIGRMSLFGGGAKEEKRRKANRKNRPRLKGKTGINRTESMF

SEQ ID NO: 737 - DNA, 1419 bp, Glycine max
  CDS (1)..(1419)
atggatggaattttcgcttacaccattctcattttgcttaccatattttcatttatgttcttaccaaaaccaaacagaagaagacctcagaaccagacacttgcaaagctccctccaggctcaatggggtggccgtacataggagaaacccttcaactctattcccaagacccaaatgcctacttttccaccaaacataaaaggtatggcgaaatattcaagaccaacatcttgggttgcccctgtgtgatgctgacaagccctgaggctgcacgctttgtgctagtgactcaagctcacttgttcagaccaacatacccgaaaagcaaggagcgtttgattggtccttttgctctgtttttccaccaaggtgaataccacacacgtttgaggaagcttgttcagaggtcactgtctctagaagcacttcgcgacttggtgcctcatattgaagccttagccttatctgccatgaactcttggggtggtgatggccaagtcattaacacatttaaggaaatgaaaatgttttcttttgaagttggaatcctcacaatttttggctatctagagccgcgtttgagggaggagctgaagaagaattaccggattgtggacaatggttacaattcctttccaacgtgcatcccgggaacacaataccaaaaggcactattggctagaaggagacttggcaagattataggtgacataatttgtgagaggaaggagaagaagttgcttgaaagggatctattgagctgcttattgaattggaaaggtgaagggggagaagtgttatctgattaccaaattgcagataacattattggggtgctttttgctgctcaggacaccacagctagtgccatgacatgggttgtaaagtacctgcatgatgaacccaaacttctggagtctgtaaaggctgagcagaaggcaattcacaagtctaatgaaggtaacctaccactgagttgggatcagactagaaacatgcgaattactcacaaggttgtgttagagagtttgagaatggcaagcatcatatcattccctttcagagaagcaatagctgatgtggaatacaagggattcctaataccaaaagggtggaaagcgatgcctctgttcagaaatattcaccacaatccagaatattttccagagcctcagaagttcaacccttcaaggtttgaggttgcaccaaagcccaatactttcatgccatttggtagtggagtacatgcctgccccggcaatgagcttgctaagctggagacactgattatgatccatcatttggtcaccaagtttcggtgggaagtggtaggatccaagtgtgggattcaatatggcccattccccttgccactgaatggactcccagctagatgttggagagaatctaccagctag

SEQ ID NO: 738 - protein, 472 aa, Glycine max
MDGIFAYTILILLTIFSFMFLPKPNRRRPQNQTLAKLPPGSMGWPYIGETLQLYSQDPNAYFSTKHKRYGEIFKTNILGCPCVMLTSPEAARFVLVTQAHLFRPTYPKSKERLIGPFALFFHQGEYHTRLRKLVQRSLSLEALRDLVPHIEALALSAMNSWGGDGQVINTFKEMKMFSFEVGILTIFGYLEPRLREELKKNYRIVDNGYNSFPTCIPGTQYQKALLARRRLGKIIGDIICERKEKKLLERDLLSCLLNWKGEGGEVLSDYQIADNIIGVLFAAQDTTASAMTWVVKYLHDEPKLLESVKAEQKAIHKSNEGNLPLSWDQTRNMRITHKVVLESLRMASIISFPFREAIADVEYKGFLIPKGWKAMPLFRNIHHNPEYFPEPQKFNPSRFEVAPKPNTFMPFGSGVHACPGNELAKLETLIMIHHLVTKFRWEVVGSKCGIQYGPFPLPLNGLPARCWRESTS

SEQ ID NO: 739 - DNA, 1008 bp, Oryza sativa
  CDS (1)..(1008)
atggcgatggcgacagcagcatgcagaaggcctgcagtgatgctcatggcgttcgccatggcggctgcggtgacgatgagctccgtgccgccggcgtcggggacgacgacgctgcagtacgacttctactcgtcgtcgtgcccgaaagccgaggagacggtgaggaacgtcgtcgagccgatgatcttcaacgaccccaccatgggcgccgccttcatccgcctcttcttccacgactgcttcgtcaggggttgtgacgcgtccatcctgctggacccgacgagcagaaacacgcagccggagaagacggcgatcccgctgcgcggctacgacgccgtgaacaagatcaaggccgccgtcgaggccgtctgccccggcaaggtctcctgcgccgacatcctcgccttcgccgcgcgcgactccgccgtcgtcaacggcaacttcgccttcgccatgccctccggccgccgcgacggcaccgcctcctccgcctccgacgtcgcccggttcatcccgtccccggcgttccacctccaggacctcgtcgacagcttcgccgccaagggcctcaccgccgacgacctcgtcatcctctccggcgcccactccttcggcctcacccactgcgccttcgtcaccggcaggctctaccccaccgtcgaccccaccatgaacgccacgttcgccgcggcgctcaagaagctgtgcccgccgccggcgagcggcggcggcgggagggcggtgagcaacaaccaggtgaccgaccccaacgtgctgagcaaccagtacttcaagaacgtggccgccggggaggtgatgttcacgtcggaccagacgctgacgagccgcgacgacaccaaggcgatggtcgacgacaacgccgccaacccggtggcgtggatggcgaggttcgcggcggcgatggtgaagatgggcggcgtcgaggtgctcaccgggaacgccggcgaggtcaggaaggtctgcttcgccaccaacacggcgagctga

SEQ ID NO: 740 - protein, 335 aa, Oryza sativa
MAMATAACRRPAVMLMAFAMAAAVTMSSVPPASGTTTLQYDFYSSSCPKAEETVRNVVEPMIFNDPTMGAAFIRLFFHDCFVRGCDASILLDPTSRNTQPEKTAIPLRGYDAVNKIKAAVEAVCPGKVSCADILAFAARDSAVVNGNFAFAMPSGRRDGTASSASDVARFIPSPAFHLQDLVDSFAAKGLTADDLVILSGAHSFGLTHCAFVTGRLYPTVDPTMNATFAAALKKLCPPPASGGGGRAVSNNQVTDPNVLSNQYFKNVAAGEVMFTSDQTLTSRDDTKAMVDDNAANPVAWMARFAAAMVKMGGVEVLTGNAGEVRKVCFATNTAS

SEQ ID NO: 741 - DNA, 1146 bp, Zea mays
  CDS (1)..(1146)
atggctccccccgcgctcggatctcaggtggccgccgcagcctcggtgcccgtcggctcggactctctcgccaagggcgcggcgctcaagggtaacatcactctaaactttcggaccaaaccatgcatcgggatggcattagcgtggagaaacaggacccagcaaccacggcctctgaacaaggtactctgcatgtctgttcaacaagcaagcagaagcaaggttgctgtcatgcccgtcgagttggagaaggcaaaggagccaccgctccacctctacaaaccaaaggagccttacacggccacgatcgtctctgtcgagaggcttgtaggacccagagctcctggcgaaacatgccacgttgtcatcgatcatggcggcaatgttccgtactgggaaggacagagttacggcgtcattcctcctggagagaatccaaaaaaacctggatctcccaatactgttaggctctattcaatcgcttctactaggtatggtgattcttttgatggaaagacagcaagcttatgtgttcgtcgtgctgtttattatgatcctgaaactggagaggaagacccctcaaagagaggtgtctgcagtaacttcctgtgtggctcaaaaccaggggacaaagttcagatcacaggcccctcgggcaaaataatgcttcttcccgaggatgatccaaatgcgactcatatcatgattgctacggggactggtgttgctccctaccgcggctacctacgtcgcatgttcatggaagatgtcccaactttcaaatttggtggtctggcttggctcttccttggtgttgcgaactctgacagccttctctatgatgaagagttcacaaactaccttcagcagtatccagacaatttcaggtacgacaaagcgctaagcagggagcagaagaacaagagcggcgggaagatgtacgtgcaggacaagatcgaggagtacagcgacgaaatcttcaggctgctagatggcggtgcgcatatttacttctgtggtttgaagggaatgatgccggggatccaggacacgctcaagaaggtggctgagcaaagaggcgagagctgggaccagaagctgtcacagctgaaaaagaacaagcagtggcacgtcgaggtttactag

SEQ ID NO: 742 - protein, 381 aa, Zea mays
MAPPALGSQVAAAASVPVGSDSLAKGAALKGNITLNFRTKPCIGMALAWRNRTQQPRPLNKVLCMSVQQASRSKVAVMPVELEKAKEPPLHLYKPKEPYTATIVSVERLVGPRAPGETCHVVIDHGGNVPYWEGQSYGVIPPGENPKKPGSPNTVRLYSIASTRYGDSFDGKTASLCVRRAVYYDPETGEEDPSKRGVCSNFLCGSKPGDKVQITGPSGKIMLLPEDDPNATHIMIATGTGVAPYRGYLRRMFMEDVPTFKFGGLAWLFLGVANSDSLLYDEEFTNYLQQYPDNFRYDKALSREQKNKSGGKMYVQDKIEEYSDEIFRLLDGGAHIYFCGLKGMMPGIQDTLKKVAEQRGESWDQKLSQLKKNKQWHVEVY

SEQ ID NO: 743 - DNA, 2199 bp, Glycine max
  CDS (1)..(2199)
atggaaaccaactcagtttccaagcttctgttgcttgtcttcagtgttctctttgttggttctgagttgatccattgcagtgtcacctatgataggaaggccattatcatcaatggccaaaggagaatcctcatctctggctccattcactaccccagaagcacccctgaaatgtgggaggatctaattcggaaggcaaaagacggaggccttgatgtcatcgacacttatgtcttttggaatgttcatgaaccatctcctggcaattacaattttgaagggaggaacgatctggtacggttcattaagacagtgcaaagggtggggctctatgtccatcttcgcattggaccttatgtgtgtgctgagtggaactttggaggatttcctgtttggttgaagtatgttcctggcatcagcttcagaacagataatggcccttttaaggctgcaatgcaaggttttactcagaaaatagtgcagatgatgaagaatgaaaagttatttcagtctcagggtggcccaatcattctctctcagattgagaatgagtatggaccagaaagcgggcaactgggagctgctggtcatgcatacacaaattgggctgcaaagatggccgttggattagccacaggtgtcccctgggtgatgtgcaagcaagatgatgccccagatccagtgataaatacatgtaatggattttattgtgattatttctctccaaataaaccatacaagcctagcctttggactgagtcttggagtggctggtttacagaatttggtggtccaatttatcagcgaccagttcaagatctagcatttgcagttgctcgtttcgttcaaaagggtggctcacttttcaattactatatgtaccatggaggaacaaattttggacgatcggctggagggccattcattactacaagctatgactatgatgctccaattgatgaatacggtttgatcagggaacctaagtatggtcatttgaaggaccttcataaagctattaagcaatgtgaacatgctttggtttcttcagatcccactgtcacatcattaggaacgtatgagcaggctcatgtgttctcttcaaaaaatggagcatgtgcagcttttctagcaaactaccattcgaattctgctgcaagagtgaagttcaataacaggaactatgacttgcctccttggtcaataagtatcctcccagattgtagaacagatgtatttaacactgcaagagtaagttttcaaacttcacagatacaaatgttgcctagcaattctaggttgttatcatgggagacctatgatgaagatgtatcttcgctagccgaaagttccaagattacagcttctggactattagaacagatcagcactaccagagacactagtgactatctatggtatataaccagtgctgacataagttcatcagaatcctttcttagaggaaggaacaagcccagcattactgtgcattctgcaggccatgctgttcatgtgtttgttaatggtcaattttcaggctccgcttttgggacaagtgaagacagaagttgcacatttaatggccctgtcaacctacgtgcaggaactaataaaatagcacttctcagtgttgctgttggattaccaaatgttggattccattttgaaacatggaaggctgggatcactggagttttgcttcatggtcttgaccatggacagaaagatttgacttggcagaagtggtcataccagattggcctaaaaggagaggctatgaatttggtgtctcccaatggagtctcatctgttgactgggtgagagactcactagctgtccgaagccagtcacagttgaaatggcacaaggcttatttcaatgcacctgatggagttgaaccattggccttggacctgagcagcatgggaaagggtcaagtatggatcaatggacaaagcatagggagatattggatggtttatgcaaagggtgcttgtggttcttgcaactatgctgggacataccggcctgcaaagtgccaacttggttgtggacaacctactcaacgatggtatcacgtgccaagatcatggttaaagccaacaaagaacttgatagtagtatttgaggaattgggtgggaatccttggaaaatagctctagtaaaaaggacaatacatactccagcaaactag

SEQ ID NO: 744 - protein, 732 aa, Glycine max
METNSVSKLLLLVFSVLFVGSELIHCSVTYDRKAIIINGQRRILISGSIHYPRSTPEMWEDLIRKAKDGGLDVIDTYVFWNVHEPSPGNYNFEGRNDLVRFIKTVQRVGLYVHLRIGPYVCAEWNFGGFPVWLKYVPGISFRTDNGPFKAAMQGFTQKIVQMMKNEKLFQSQGGPIILSQIENEYGPESGQLGAAGHAYTNWAAKMAVGLATGVPWVMCKQDDAPDPVINTCNGFYCDYFSPNKPYKPSLWTESWSGWFTEFGGPIYQRPVQDLAFAVARFVQKGGSLFNYYMYHGGTNFGRSAGGPFITTSYDYDAPIDEYGLIREPKYGHLKDLHKAIKQCEHALVSSDPTVTSLGTYEQAHVFSSKNGACAAFLANYHSNSAARVKFNNRNYDLPPWSISILPDCRTDVFNTARVSFQTSQIQMLPSNSRLLSWETYDEDVSSLAESSKITASGLLEQISTTRDTSDYLWYITSADISSSESFLRGRNKPSITVHSAGHAVHVFVNGQFSGSAFGTSEDRSCTFNGPVNLRAGTNKIALLSVAVGLPNVGFHFETWKAGITGVLLHGLDHGQKDLTWQKWSYQIGLKGEAMNLVSPNGVSSVDWVRDSLAVRSQSQLKWHKAYFNAPDGVEPLALDLSSMGKGQVWINGQSIGRYWMVYAKGACGSCNYAGTYRPAKCQLGCGQPTQRWYHVPRSWLKPTKNLIVVFEELGGNPWKIALVKRTIHTPAN

SEQ ID NO: 745 - DNA, 1110 bp, Brassica napus
  CDS (1)..(1110)
atgaggctttatttctctgtctccttcatcttcttcggcttaatctctcttcaacttccacctctgtccactcagcaagctacggaaacatgcagctcaactctacctctcaacgacctcacctttgactctaccctccttcaatgcgtccaagcttggactccccaaaactatatcctccgatatgctaaaacggtggagaacacatggagcttcatcttatcagctcctgatgccaacgcctacatagggatcggattctccaccaacggtcagatgaccggagctagcgccatcgtcgggtggataccaaccgacggaaaaggacaggcgaaacagtacttgctcggagggaagtctccaggcgaggtgaagcctgaccaaggcgatctcaagatcgtcaacggctcgttgaagatcgagtcagtgtcgtcgcgtctctacatgagttttcagctgaccgcggagctgccgcggcagagccttctttacgccatgggacctgccggattcattccaagttcgccggggtttactttgagggagcaccgcgacatgaccaccacgactatcaattataatacaggttcgcagagtgtggttaagggttcaccacattctaagctaaggaagacacatgggctaatgaacatgttcggctggggaatattaatcatcatcggcgccttagtggctcgacacatgaagcaatggaaacccacttggttctatgcccatatcgctctccaaaccactggttttctcctcggtttaactggtatcatttgcggtttggttcttgaaaaccgaaccgaagccaacaatgtctccaagcacaaaggccttgggataacaatctttgtcatgggcattctccaggttctagcgttgctggctcgaccggacaaagactcgaaatacagaaaatactggaattggtatcatcacaacgtaggaagagttatgataatacttgctatctccaacatcttctacggtattcatttggctgatgctggctcttcatggaacggcggttatggttttgtggttgctgtcttggttttggctgccattggattagaagttagaaagtttaagaacaagtga

SEQ ID NO: 746 - protein, 369 aa, Brassica napus
MRLYFSVSFIFFGLISLQLPPLSTQQATETCSSTLPLNDLTFDSTLLQCVQAWTPQNYILRYAKTVENTWSFILSAPDANAYIGIGFSTNGQMTGASAIVGWIPTDGKGQAKQYLLGGKSPGEVKPDQGDLKIVNGSLKIESVSSRLYMSFQLTAELPRQSLLYAMGPAGFIPSSPGFTLREHRDMTTTTINYNTGSQSVVKGSPHSKLRKTHGLMNMFGWGILIIIGALVARHMKQWKPTWFYAHIALQTTGFLLGLTGIICGLVLENRTEANNVSKHKGLGITIFVMGILQVLALLARPDKDSKYRKYWNWYHHNVGRVMIILAISNIFYGIHLADAGSSWNGGYGFVVAVLVLAAIGLEVRKFKNK

SEQ ID NO: 747 - DNA, 2532 bp, Glycine max
  CDS (1)..(2532)
atgaaactgtgtttacttttggtgttgttgttggtcacattcacagtggccttatctgggaatgtcagctacgacggtcgctcgcttctcattgatggccaacgcaagcttcttatctctgcttccattcattacccacgcagcgttcccgcgatgtggcctggtctcgttcaaacagccaaggaaggaggggtggatgtgattgaaacctatgttttttggaatggccatgagctttctccaggcaactattactttggaggaaggtttgatctagtcaagtttgcgaagactgttcagcaggctgggatgtacttgattcttcgaataggcccatttgttgctgcagaatggaattttggtggtgtaccggtatggctgcattatgttccaggcacggtattccggacttacaatcagccttttatgtatcatatgcagaagtttacaacatacatagtgaaccttatgaaacaagagaagctttttgcttcacaagggggtcccataatcttatctcagatagaaaatgaatatgggtactatgaaaatttttataaggaggatggtaagaaatatgccttgtgggctgcaaagatggctgtttctcaaaatacaggtgtcccttggataatgtgccaacaatgggatgctccagatcctgtgattgatacatgcaattcattctactgtgaccaatttacacctacttctccaaacaggcccaaaatttggactgagaactggcctggatggtttaaaacttttgggggaagagatcctcacaggccagcagaagatgttgcattttctgttgctcgtttcttccagaaaggtggaagtgtacataattactacatgtatcatggaggaacaaattttgggcgtacagcaggtggtccattcattactacaagttatgactatgatgccccagtagatgagtatgggttacctagacttccaaaatggggacatcttaaggaacttcacagagctatcaagttatgtgagcacgtattgcttaatggtaaatcagttaatatctcccttggtccttctgtggaggctgatgtctatactgactcatcaggagcatgtgcggcctttatttctaatgttgatgataaaaatgataagacagtggaatttcgaaatgcatcatatcacttgccagcttggtcagttagcattcttcctgattgcaagaatgtagtattcaacacagctaaggttacttcccagacaaatgtagttgcaatgattcccgagagtttgcagcaatcagataaaggtgtaaattctcttaaatgggacatagtgaaggagaagccaggaatctgggggaaggcagactttgtcaaaagtggttttgttgatctcatcaatactaccaaagataccactgactacctgtggcatacaacaagtatatttgtaagtgagaatgaagagttcttaaagaagggaagcaaaccagtccttctaattgaatccacaggtcatgctctccatgcttttgtgaaccaagaatatcaaggtactggtactggaaatggtacacattcaccattctcttttaagaatcccatctccctgagggcagggaaaaatgaaattgctttgttgtgcttgaccgttggcttacagacagcaggaccattttatgacttcataggggcaggactaactagtgtgaagatcaagggactgaaaaatgggacaatagacttgtcttcttatgcctggacttacaagattggagtgcaaggagaatatctaaggttataccagggaaatgggttgaataaagtgaactggacatctacttcagaaccacaaaaaatgcagccattgacatggtacaaggcaattgtggatgctccgcctggggatgaaccagttggattggatatgttacatatgggaaagggtctagcctggttaaatggagaagaaataggaagatattggcctaggaaaagtgaattcaagagtgaagactgtgtgaaagaatgcgattacagaggcaaatttaatcctgacaaatgtgacactggttgtggagaacctacacagagatggtaccatgttccacgatcttggttcaagccatctggaaatattcttgttctttttgaggagaaaggtggagatccagaaaagattaagtttgtgagacggaaagtatctggagcttgtgcccttgttgctgaggattacccctctgttggactcctttcccagggtgaagataaaatacagaataacaaaaacgttccttttgcccatttgacatgccccagcaacactcgtatatctgctgtgaagtttgctagctttggaaccccctctgggtcatgtggatcttacctcaagggagattgccatgatcccaattctagcacaattgttgagaaggcatgcctaaacaaaaacgactgtgtcataaaattaactgaagagaatttcaaaaccaacttgtgtcctggtttatcaaggaaacttgcagtggaagcagtctgtagttga

SEQ ID NO: 748 - protein, 843 aa, Glycine max
MKLCLLLVLLLVTFTVALSGNVSYDGRSLLIDGQRKLLISASIHYPRSVPAMWPGLVQTAKEGGVDVIETYVFWNGHELSPGNYYFGGRFDLVKFAKTVQQAGMYLILRIGPFVAAEWNFGGVPVWLHYVPGTVFRTYNQPFMYHMQKFTTYIVNLMKQEKLFASQGGPIILSQIENEYGYYENFYKEDGKKYALWAAKMAVSQNTGVPWIMCQQWDAPDPVIDTCNSFYCDQFTPTSPNRPKIWTENWPGWFKTFGGRDPHRPAEDVAFSVARFFQKGGSVHNYYMYHGGTNFGRTAGGPFITTSYDYDAPVDEYGLPRLPKWGHLKELHRAIKLCEHVLLNGKSVNISLGPSVEADVYTDSSGACAAFISNVDDKNDKTVEFRNASYHLPAWSVSILPDCKNVVFNTAKVTSQTNVVAMIPESLQQSDKGVNSLKWDIVKEKPGIWGKADFVKSGFVDLINTTKDTTDYLWHTTSIFVSENEEFLKKGSKPVLLIESTGHALHAFVNQEYQGTGTGNGTHSPFSFKNPISLRAGKNEIALLCLTVGLQTAGPFYDFIGAGLTSVKIKGLKNGTIDLSSYAWTYKIGVQGEYLRLYQGNGLNKVNWTSTSEPQKMQPLTWYKAIVDAPPGDEPVGLDMLHMGKGLAWLNGEEIGRYWPRKSEFKSEDCVKECDYRGKFNPDKCDTGCGEPTQRWYHVPRSWFKPSGNILVLFEEKGGDPEKIKFVRRKVSGACALVAEDYPSVGLLSQGEDKIQNNKNVPFAHLTCPSNTRISAVKFASFGTPSGSCGSYLKGDCHDPNSSTIVEKACLNKNDCVIKLTEENFKTNLCPGLSRKLAVEAVCS

SEQ ID NO: 749 - DNA, 525 bp, Glycine max
  CDS (1)..(525)
atggcgttttctcaggttatcacaacacttctttttgcattagctatagccagaattagcccctcagcatgccaaacggtagagggcaaagtctcttgcactgactgcgctgacaactacgatttctctggcattaaggtctcagtgaagtgtgaaggtgtgaaaaacctggctatggcgaccacagaagataagggcttcttccaggttgaccttccctcagaccaaacaaaacctccctcagtgaattgctttacaaaacttctcggggggccaaatactaatctttatgcctcaaagaaaaacctggtctctcaaattgttaagggaaaagagaaaaacacatacaccatctccactcctcttagtttcttcacatcgtgtccccagaacactgaatgcaaggctgctaattataaccagttcggttcatccaaaacctttgatcttccattgcctcgggagtggggtttggctcctagtagcttctatgttcctttcttccccatcatcggaattccttaa

SEQ ID NO: 750 - protein, 174 aa, Glycine max
MAFSQVITTLLFALAIARISPSACQTVEGKVSCTDCADNYDFSGIKVSVKCEGVKNLAMATTEDKGFFQVDLPSDQTKPPSVNCFTKLLGGPNTNLYASKKNLVSQIVKGKEKNTYTISTPLSFFTSCPQNTECKAANYNQFGSSKTFDLPLPREWGLAPSSFYVPFFPIIGIP

SEQ ID NO: 751 - DNA, 963 bp, Glycine max
  CDS (1)..(963)
atgatgacacaagattcatcagaggtgttggaaaaacatgcaagctcaggctctgttgtgagggggagtagtgaatatattagactggtcatatccgatgaaccaagggcggttgaagctgaaaccttgctgcctcgagcagaatcaagaatcaagtctttctggtggtggatgaaatcctttttatggtgtgttatctttgtgttccttgcttttattcttgtgaaatggggagtgtcacttttttttgaaaaggttctttacccaatcatggaatgggaagctactgcctttggccgtccagttcttgctttagtactagttgcctctctggctttattcccggtgttcttaatcccttctggcccctccatgtggctggctgggatgatttttggttatggccttggcttcgttataataatggttggaacaaccattgggatggtgctgccatacttaattgggctactgttccgtgaccgaattcatcaatggttaaagagatggccccagaatgctgcactgattaggcttgctggggaagggaactggtctcgtcaatttcaagtggttgcactgtttagggtttctccttttccctatactatattcaattatgccgtggtagtcacaaatatgaggttttggccctacttatgtggatcagtagctggaatggtaccagaagctttcatctatatctacagtggtcggttaataaagacattggcagacgcacagtatgggaagcaccacttgactactgtggaaatcgtatacaacattatttctttcattattgcaatagttaccactattgccttcactgtctacgcaaaaaggactctaaatgaactcaaaatggcagagttgaatgatgaagttacctctgtttctgtagagatggagaagcttccccttgaaaggcctaaacagcttagtttgccaaaaatttcgtga

SEQ ID NO: 752 - protein, 320 aa, Glycine max
MMTQDSSEVLEKHASSGSVVRGSSEYIRLVISDEPRAVEAETLLPRAESRIKSFWWWMKSFLWCVIFVFLAFILVKWGVSLFFEKVLYPIMEWEATAFGRPVLALVLVASLALFPVFLIPSGPSMWLAGMIFGYGLGFVIIMVGTTIGMVLPYLIGLLFRDRIHQWLKRWPQNAALIRLAGEGNWSRQFQVVALFRVSPFPYTIFNYAVVVTNMRFWPYLCGSVAGMVPEAFIYIYSGRLIKTLADAQYGKHHLTTVEIVYNIISFIIAIVTTIAFTVYAKRTLNELKMAELNDEVTSVSVEMEKLPLERPKQLSLPKIS

SEQ ID NO: 753 - DNA, 687 bp, Oryza sativa
  CDS (1)..(687)
atggcgcgggagaggcgggagataaagaggatagagagcgcggcggcgcggcaggtcaccttctccaagcgccggcgcggcctgttcaagaaggccgaggagctctccgtgctctgcgacgccgacgtcgcgctcatcgtcttctcctccacggggaagctatcccacttcgcaagctccagtatgaatgaaatcatcgacaagtacaacacacattctaataatctggggaaagcagaacagccttcgctcgacttgaatttagaacatagcaagtatgcacatttgaatgagcaacttgcggaagctagtctccggcttagacaaatgagaggtgaggagcttgagggattgagcattgatgaactccagcagctagagaagaacctggaagctggtctgcacagggtgatgctgacaaaggatcaacaatttatggagcagatcagtgaactccagcggaagagttcacagctggcagaggagaacatgcaactcagaaaccaggtatcccagatatcaccagctgagaagcaagttgttgatactgaaaattttgttaccgaaggacagtcctctgaatctgtgatgactgcattgcattctggaagttcacagtcgcaggataatgatgatggctcggatgtatccctgaaattagggctgccttgtggtgcatggaagtaa

SEQ ID NO: 754 - protein, 228 aa, Oryza sativa
MARERREIKRIESAAARQVTFSKRRRGLFKKAEELSVLCDADVALIVFSSTGKLSHFASSSMNEIIDKYNTHSNNLGKAEQPSLDLNLEHSKYAHLNEQLAEASLRLRQMRGEELEGLSIDELQQLEKNLEAGLHRVMLTKDQQFMEQISELQRKSSQLAEENMQLRNQVSQISPAEKQVVDTENFVTEGQSSESVMTALHSGSSQSQDNDDGSDVSLKLGLPCGAWK

SEQ ID NO: 755 - DNA, 771 bp, Brassica napus
  CDS (1)..(771)
atggtaggaccgtcgcggcctcagatcgttctgtttggatcatccatcgtccagatgagcttcggccatggaggttggggcgccattctctccgaggtctatgctcgtaaggctgacatcattctgcgtggatactatggatggaactcaactcgtgctttggaagttgtggaccaagtcttccccaaggatgctgaggtacaaccttctctggtcgttgtgtattttggaggaaacgactcaatggcgcctcacccttctggtctaggacctcacgttccactttctgaatacgttgataacatgaagaagatcgctattcatcttcagagcctttcagacacaactcgtatcatattccttagttgccctccagtggacgaggccaaacttcgtcagaaccaaagcccatacttgagcgaggtgatccgcacaaacgagctctgcaagacttattcagacgcttgcgtggagctgtgccaagagctcggcttagaagtagttgatctcttctctactcttcagaaagccgatgactgggaaaccgtttgcttcacagatgggattcatttgtcagcacaaggaagcaaactggtggctgcagagatactgagagtgatcaaagaagcggagtggacaccgtcgcttcactggaaatcgatgccaactgagttctcagaggactcaccttacgatcttgtttcagctgatggcaaaaacactgtcaactcttcagagtggacgtacttctgggaagaacaatgggattaa

SEQ ID NO: 756 - protein, 256 aa, Brassica napus
MVGPSRPQIVLFGSSIVQMSFGHGGWGAILSEVYARKADIILRGYYGWNSTRALEVVDQVFPKDAEVQPSLVVVYFGGNDSMAPHPSGLGPHVPLSEYVDNMKKIAIHLQSLSDTTRIIFLSCPPVDEAKLRQNQSPYLSEVIRTNELCKTYSDACVELCQELGLEVVDLFSTLQKADDWETVCFTDGIHLSAQGSKLVAAEILRVIKEAEWTPSLHWKSMPTEFSEDSPYDLVSADGKNTVNSSEWTYFWEEQWD

SEQ ID NO: 757 - DNA, 1482 bp, Brassica napus
  CDS (1)..(1482)
atggtagattcctggtttaacgtcttatccatggagaatcatcacccttcgactctgttatcaatggattcaagtgcttcttcacacgaggagcttgatttggagatgaacaacaaccgccaatctctcctctccggccctcccgacatcaacctacctctctccgccgagcgtagccctcctcctcagccgtggaatttagattcctgcgacattctcgatgtcgggttaggctcgcaagcctacgagaccgagaattacatgagcgtcgtccccaaagtcggtcggaaatgcgctaagcgtgtggacagcgtctggggagcttggttcttcttcagcttctacttcaagcccgctttgaacgacaagtcaaaggccaagatcgtccgcgacagcaacgggctgtcgggtttcgacaagacggatctgaagctcgacgtgtttttagtccagcacgacatggagaacatgtacatgtgggtgttcaaggagaggcccgagaatgctctcgggaagatgcagcttaggagttacatgaacgggcactcaagacaaggggaccgtttgtttccgtttagcgttgagaaagggttcgtgaggtctcataggatgcagaggaagcattatagagggttgtcgaatccgcagtgtgttcatgggattgagcttattccttcgccgaacctcgcttgtctcgatgaggaagagaggaagagatggatggagcttacgggtagggacttgaacttcgcgatcccgcctgaagctagcgactttggttcgtggaggaaccttccgaacactgactttgagcttgagaggcatccgcctgcgttgaagaacaacaactctaagaagctactcaatggttcgggtctcaatctttcgactcagccatcgaatggtgaaggaacggatctgtctccctctagccacaagaagaggaaagacatgttctcaaatgggatcaatgaagaagagtcttgcttacctcctgctatagaagttcaccacaatgagctaccaaactggtctaacgagtttagcggtgccatgaaaaacgttcacggacctgttacagctgcaaagaccatatacgaagacgaagaaggctacttgatcataatcacgcttccttttgtggatttgaacagcgtgaaagtctcgtggaggaacactctcacgcacggtatcatcaaagtctcgtgcgtcagcacgtcgcgcgtgcctttcatcaagagacatgacagaatgtttaagctgactgatccagcttccgagcattgcccaccaggagagtttgtgagagaggtagcgttatcgactcgtatccctgaagatgcgaatattgaagcgtattacgatgggcctggttcggttcttgagatacttgtcccgaagctaagagctggtccggaagagcatgaagtgagggtgtgtctgcgcccacatcttggaggaaatgatcttatgttgacataa

SEQ ID NO: 758 - protein, 493 aa, Brassica napus
MVDSWFNVLSMENHHPSTLLSMDSSASSHEELDLEMNNNRQSLLSGPPDINLPLSAERSPPPQPWNLDSCDILDVGLGSQAYETENYMSVVPKVGRKCAKRVDSVWGAWFFFSFYFKPALNDKSKAKIVRDSNGLSGFDKTDLKLDVFLVQHDMENMYMWVFKERPENALGKMQLRSYMNGHSRQGDRLFPFSVEKGFVRSHRMQRKHYRGLSNPQCVHGIELIPSPNLACLDEEERKRWMELTGRDLNFAIPPEASDFGSWRNLPNTDFELERHPPALKNNNSKKLLNGSGLNLSTQPSNGEGTDLSPSSHKKRKDMFSNGINEEESCLPPAIEVHHNELPNWSNEFSGAMKNVHGPVTAAKTIYEDEEGYLIIITLPFVDLNSVKVSWRNTLTHGIIKVSCVSTSRVPFIKRHDRMFKLTDPASEHCPPGEFVREVALSTRIPEDANIEAYYDGPGSVLEILVPKLRAGPEEHEVRVCLRPHLGGNDLMLT

SEQ ID NO: 759 - DNA, 726 bp, Brassica napus
  CDS (1)..(726)
atggcgagagagaagattcagatcaggaaaatcgacaacgcgacggcgagacaagtaactttctctaaacgaagaagaggtcttttcaaaaaagctgaagagctctccgttctctgcgacgctgatgttgccctcatcgtcttctcttccaccggaaagctcttcgagttttgtagctccagcatgagggaagtattagagaggcataatttgcagtcaaagaacttggagaagcttgatcagccatctcttgagttacagctggttgagaacagtgaaaattcccggttgagcaaagaaattgcagacaagagccaccaactaaggcaaatgagaggagaggaacttcaaggacttaacatagaagagctgcaacagctggaaaaggcccttgaagctggtttgacgcgcgtgattgaaacaaagagtgagaagattatgagtgagatcagtgaccttcaaagaaagggaatgaaattgatggatgagaacaagcggctaaggcagcatggaacacaactaacagaagagaacgagcgactaggcaagcaaatatataataatatgcatgaaagatacggtggtgttgagtcggagaagaccgccgtgtacgaggaagggcactcgtcagagtccattactaacgccggaaactccaccggcgctcctgttgactccgagagctccgatacctctctaaggctcggcttaccgtatggcggttag

SEQ ID NO: 760 - protein, 241 aa, Brassica napus
MAREKIQIRKIDNATARQVTFSKRRRGLFKKAEELSVLCDADVALIVFSSTGKLFEFCSSSMREVLERHNLQSKNLEKLDQPSLELQLVENSENSRLSKEIADKSHQLRQMRGEELQGLNIEELQQLEKALEAGLTRVIETKSEKIMSEISDLQRKGMKLMDENKRLRQHGTQLTEENERLGKQIYNNMHERYGGVESEKTAVYEEGHSSESITNAGNSTGAPVDSESSDTSLRLGLPYGG

SEQ ID NO: 761 - DNA, 1023 bp, Glycine max
  CDS (1)..(1023)
atgtccagcgttaaggagttagttgaatctaagtgtctgagttctgttccctccaactacatttgccttgaaaatcccgaagattctatattgaattatgaaacagataatattccaaccattgatttttcccaactcacctcttctaatcccagtgtacgctccaaggcaatcaaacaactaggagatgcttgccgcgattggggtttctttatgctaatcaatcacggtgtgtcggagatactaagggatgaggtgattaggacaagccagggcttttttgatctgactgagaaagaaaaaatggagcacgcaggaaggaacctatttgatccaataagatatgggacaagcttcaatgtcacggtggacaagacccttttctggagagattatctcaaatgtcatgttcaccctcactttaatgctccttccaagcctcctggttttagccaaactttagaggaatacattaccaagggcagggaactggttgaagagttgctagaaggaatatctctaagcttagggcttgaagaaaacttcatacataaaaggatgaatctagacttgggatcccagttgctggttatcaactgttacccaccatgtcctaaccctgagcttgttatgggccttcctgcacacacagaccatgggcttctgaccctcctaatgcaaaacgagcttggagggcttcaaattcaacacaatggcaagtggattcctgtccaccccttacccaactcctttctcatcaacactggggatcacatggagatactgaccaatgggaaatacaagagtgttgttcatcgagctgtagcgaacacgaaagccactaggatttccgttggtacagcacacggacccaagcttgacaccattgtggggcccgcaccagagcttgttggcgatgataatactgcttcataccgtgccatcaaatacagtgattacatcgagcttcagcaaaaccatgaactcgacggaaagtcgtgcttggatcgtattcgcatttga

SEQ ID NO: 762 - protein, 340 aa, Glycine max
MSSVKELVESKCLSSVPSNYICLENPEDSILNYETDNIPTIDFSQLTSSNPSVRSKAIKQLGDACRDWGFFMLINHGVSEILRDEVIRTSQGFFDLTEKEKMEHAGRNLFDPIRYGTSFNVTVDKTLFWRDYLKCHVHPHFNAPSKPPGFSQTLEEYITKGRELVEELLEGISLSLGLEENFIHKRMNLDLGSQLLVINCYPPCPNPELVMGLPAHTDHGLLTLLMQNELGGLQIQHNGKWIPVHPLPNSFLINTGDHMEILTNGKYKSVVHRAVANTKATRISVGTAHGPKLDTIVGPAPELVGDDNTASYRAIKYSDYIELQQNHELDGKSCLDRIRI

SEQ ID NO: 763 - DNA, 495 bp, Oryza sativa
  CDS (1)..(495)
atggcagggccatgccccctcctccggtcgttcctgaggaactgcgtcgccggaaccctcgtcgtcgtcaccgtcaacgaccggtacgcctccgtcatcaccgtgcgtggcacctccatgaaccccaccttggagtcccaacaaggtgaccgcgcgctggtgagccggctctgcctcgacgcccgctacggattgtcccgcggcgacgtcgtcgtcttccggtcgccgacggagcaccggagcttgttggtgaagaggttgatcgcgttgcccggcgactggatccaggtgccggcggctcaggagatccggcagatacccgtggggcactgctgggtggaaggggataatcctgacgtcagctgggactcgcgaagctatggccctattcctctcggtctgatgcaggggagggtcacacacatagtctggccaccaaatagaattggcccagttgagagaaagatgccagaaggaagagtaatgcagcgatga

SEQ ID NO: 764 - protein, 164 aa, Oryza sativa
MAGPCPLLRSFLRNCVAGTLVVVTVNDRYASVITVRGTSMNPTLESQQGDRALVSRLCLDARYGLSRGDVVVFRSPTEHRSLLVKRLIALPGDWIQVPAAQEIRQIPVGHCWVEGDNPDVSWDSRSYGPIPLGLMQGRVTHIVWPPNRIGPVERKMPEGRVMQR

SEQ ID NO: 765 - DNA, 666 bp, Brassica napus
  CDS (1)..(666)
atggcgagagagaagataaggataaagaagatagataacctaacagcgagacaagttactttctctaagagaagaaggggaatcatcaagaaagccaatgaactttcgattctttgcgatgctgatgttgctctcatcatcttctctgctactggaaagctcttcgagttctctagctcaagtatgagagacatcttgggaaggtataatcttcatgcaagtaacatcaacaaaatgatgggtccaccttctccgtatcaccagctagataattgtaacctctcccgactaagtaaggaagtcgaagacaaaaccaagcagctcagacaaatgagagggggagatcttgaaggattgaacttagaagagttgcagcggctggagaaatcgcttgaatctggacttagtcgtgtgtctgaaaagaagggcgaatgtgtgatgagccagatatcttcacttgagaaacggggatcagagttggtggatgagaatagaagactgagggagcaactagtgacgttggaaatggctaaaacgatggcgttaaaggaggctgtggagacagagtcggcgaccacaaatgtgtcaagctatgacagtgcagctcccattgaagatgacttctcagatacttcccttaagcttgggcttccatcttgggaatga

SEQ ID NO: 766 - protein, 221 aa, Brassica napus
MAREKIRIKKIDNLTARQVTFSKRRRGIIKKANELSILCDADVALIIFSATGKLFEFSSSSMRDILGRYNLHASNINKMMGPPSPYHQLDNCNLSRLSKEVEDKTKQLRQMRGGDLEGLNLEELQRLEKSLESGLSRVSEKKGECVMSQISSLEKRGSELVDENRRLREQLVTLEMAKTMALKEAVETESATTNVSSYDSAAPIEDDFSDTSLKLGLPSWE

SEQ ID NO: 767 - DNA, 1410 bp, Brassica napus
  CDS (1)..(1410)
atgggaggttgcgtgtctacaccgaagagctgtgttggatcgaagatgaggtctaagcgaaggaagagtcgtaaaagacgaaagcttcaaaggaaaagagcagccgccggatcatttgacaatctcgatcatcctcccaacaacttgcccactcccagtttcagagtaagtggagaagaagcatggtttgagtccaatgcagcctttgaaacagattgtgatgatgatttccatagcgtcactgaagatagcttgtctttaaacggaggtgagcgtgcatcagtctccagtactataaccacatcatcaacaggagactctgactcaaacgaatccatgtcccagtcgaaatctgacacaaaccagcctgattccattgattcatcatctgcagacgaaggaggacacttgcctaataactgtttgccttgtctgactccaataagtgttgttccttgtgttgaaaaaggaaggtctcttagctctagccctccaagctccaggaaaaaagcgtctcttaaactatcttataaatggagagaaggtcatgcttcaggagccttgtttctttctaaactacagttgaagagaccagtagctggttctcaggtccctttctgtccagtcgacaagaaaatgctagactgttggacaaccatcgagccaaatagcttccgcgttcgtggcaaaacatatctaagggacaagaagaaagagtttgcagctagccaagctgcttataacccttttggtgtcgatgttttcttagcagaacgtaaaataaaccatatcgcacaatacgtcaagcttcccgtaactaccgcatccgcaaaactcccatctctccttgttgttaatgttcagattccattgtatccaactacgatcttccaaggcgaaactgatggagaaggaatgaatattgttttgtacttcaaactttcggataattattcaaaggagcttccgcttcattttcaagaaagcattcagagattaatagatgatgaggttgagaaagttaaaagcttccctatggatacaaccgcgcctttcagagaacggctgaagatattgggacgtgttgccaacgtggatgatctgcatttgagtggtccagagaagaagctgatgcaggcttacaacgagaagcctgttctttcgcgtccgcagcacgagttctactcgggtgaaagttactttgagattgatattgatatgcatagattcagttatatatcccggaaagggtttgaaacattcatagacagactcaagatctgcgttcttgatgttggcctcacaattcagggtaacaaaccagaggagctaccagagcagattctgtgttgtgtcaggctaaatgggattgacttcatgaactatcatcaattaactcaagaagtataa

SEQ ID NO: 768 - protein, 469 aa, Brassica napus
MGGCVSTPKSCVGSKMRSKRRKSRKRRKLQRKRAAAGSFDNLDHPPNNLPTPSFRVSGEEAWFESNAAFETDCDDDFHSVTEDSLSLNGGERASVSSTITTSSTGDSDSNESMSQSKSDTNQPDSIDSSSADEGGHLPNNCLPCLTPISVVPCVEKGRSLSSSPPSSRKKASLKLSYKWREGHASGALFLSKLQLKRPVAGSQVPFCPVDKKMLDCWTTIEPNSFRVRGKTYLRDKKKEFAASQAAYNPFGVDVFLAERKINHIAQYVKLPVTTASAKLPSLLVVNVQIPLYPTTIFQGETDGEGMNIVLYFKLSDNYSKELPLHFQESIQRLIDDEVEKVKSFPMDTTAPFRERLKILGRVANVDDLHLSGPEKKLMQAYNEKPVLSRPQHEFYSGESYFEIDIDMHRFSYISRKGFETFIDRLKICVLDVGLTIQGNKPEELPEQILCCVRLNGIDFMNYHQLTQEV

SEQ ID NO: 769 - DNA, 1542 bp, Glycine max
  CDS (1)..(1542)
atgggcgattcttgtcttacttctttgtcaatggagaatcatcacccttccacgctcttgtcaatggactcaagtgcatcttctcacgaggaactggatttggagatgaatcgccaaatcatactcacccgtccgccggatattaatcttcccctctccgccgagcgcagcccaccgccacagccgtggaattctgagccctgtgatattctagatgttggtcttggtactcaaggctatgagactgagagttttctcaatctgcccaaagctggtaggaagtgcgcgaagcgtgttgatagcatatggggtgcttggtttttcttcagtttttactttaagcctgctttgaatgacaagtccaaggccaagattgtcagggacagcaacggtgtctcagggttcgataagtctgatctgaagctggatgttttcatggttcagcacgacatggaaaacatgtacatgtgggttttcaaggagaggccggagaacgcgctgggtaagatgcagctgaggagttacatgaatgggcattctcgccaaggggagcgcccgtttccgtttagtgctgacaagggttttgctcggtcccacaggatgcaacgaaagcattatagaggactatcaaaccctcaatgcgtgcatggcgttgaggttgtttccacacccaatctgatgaccctggatgaggatgatcgaaaaaggtggatagaactcactggccgagacttgaattttacaattccaactgaagcaagtgatttcagttcatggagaaatcttcccaacacggactttgagcttgagaggccacctcccccaatcaagaatggtcctaatgcacacccgaagaagctgcttaatggatctggacttaacggatctggtcttaacggatctggtcttaatggatctggacttcacctatctaaccacagtaatggtgatgggttggacctctctcctgtcagcagcaaaaagaggaaggactttttccctcatgggaatgaagaagaatgttacttggctgttaatcctccatccgatcgtattccagatatagaaatgcacccaactgagccacactggttgaatgacttcagcggggtgataaaaagtgtttatggacctgttacagctgcaaaaactatttatgaggatgaacaaggttacttgattattatcagtctgccctttgtagatcttccaagtgtgaaagtttcatggaggaacactctgactcacggtatcataaaggtttcttgtatgagcacatctcgaaagcctctcatcaagagacatgataggacattcaagcttacagatccatcgtcagagcactgccctcctggagagttcgtccgagaaatccctctttcaacccgaattcctgaagacgccaacatagaagcatactacgatgggccaggatctgtgcttgagatcctggtgccaaaacattgcgtgggacctgaagagcatgaagtccgtgtttgcctccgccctcatctgggagggaatgatcttaagttaacttga

SEQ ID NO: 770 - protein, 513 aa, Glycine max
MGDSCLTSLSMENHHPSTLLSMDSSASSHEELDLEMNRQIILTRPPDINLPLSAERSPPPQPWNSEPCDILDVGLGTQGYETESFLNLPKAGRKCAKRVDSIWGAWFFFSFYFKPALNDKSKAKIVRDSNGVSGFDKSDLKLDVFMVQHDMENMYMWVFKERPENALGKMQLRSYMNGHSRQGERPFPFSADKGFARSHRMQRKHYRGLSNPQCVHGVEVVSTPNLMTLDEDDRKRWIELTGRDLNFTIPTEASDFSSWRNLPNTDFELERPPPPIKNGPNAHPKKLLNGSGLNGSGLNGSGLNGSGLHLSNHSNGDGLDLSPVSSKKRKDFFPHGNEEECYLAVNPPSDRIPDIEMHPTEPHWLNDFSGVIKSVYGPVTAAKTIYEDEQGYLIIISLPFVDLPSVKVSWRNTLTHGIIKVSCMSTSRKPLIKRHDRTFKLTDPSSEHCPPGEFVREIPLSTRIPEDANIEAYYDGPGSVLEILVPKHCVGPEEHEVRVCLRPHLGGNDLKLT

SEQ ID NO: 771 - DNA, 1050 bp, Brassica napus
  CDS (1)..(1050)
atgcattctactttgtccacttggacaatcttaatcacattggcatgtcttatgcttcgtgcgtctctgtccgatgctcagcttacccctaccttctacgacagttcatgcccaaacgtcactaacatcgtacgagaaaccattgtcaacgagctaagatcagaccctcgtatcgccgcgagtatccttcgtcttcacttccacgactgctttgttaatggttgtgatgcatcgatcttgttagacaacacgacatcattccgaacagagaaagatgcagctggaaatgcaaactcggctcggggatttcctgtgattgatagaatgaaagccgcagtggagagggcatgcccgagaaccgtttcatgcgcagatatgctcaccatcgcagctcaacaatctgtcactttggcaggaggccctgcatggagggttcctttggggagaagagacagcttacaagcgtttctgaatctagctaatgctaatcttccagctccattcttcacacttccacaacttaaagccagctttagaaacgttggcctcgaccgtccttctgatctcgttgctctttccgggggtcacacatttggtaagaatcaatgccggttcattatggacagattatacaacttcagcaacaccggtttacctgatcctaccctcaacactacttacctccaaactcttcgtggactatgtccacgtaccggtaacctaagcgccttggtggattttgatctgcgtacacctacggttttcgacaacaaatactatgtgaatctaagagaacagaaaggtcttatccagagcgaccaagaattgttctctagtcctaatgctactgacacaatccccttggtaagagcatatgctgatggcacacaaacattcttcaatgcgtttgtggaggcgatgaataggatgggaaacattacacctcttacgggaactcaaggacagatcaggctgaactgtaggatggtgaattccaactctctactccatgacgttgttgatatcgttgattttgttagctctatgtga

SEQ ID NO: 772 - protein, 349 aa, Brassica napus
MHSTLSTWTILITLACLMLRASLSDAQLTPTFYDSSCPNVTNIVRETIVNELRSDPRIAASILRLHFHDCFVNGCDASILLDNTTSFRTEKDAAGNANSARGFPVIDRMKAAVERACPRTVSCADMLTIAAQQSVTLAGGPAWRVPLGRRDSLQAFLNLANANLPAPFFTLPQLKASFRNVGLDRPSDLVALSGGHTFGKNQCRFIMDRLYNFSNTGLPDPTLNTTYLQTLRGLCPRTGNLSALVDFDLRTPTVFDNKYYVNLREQKGLIQSDQELFSSPNATDTIPLVRAYADGTQTFFNAFVEAMNRMGNITPLTGTQGQIRLNCRMVNSNSLLHDVVDIVDFVSSM

SEQ ID NO: 773 - DNA, 1422 bp, Glycine max
  CDS (1)..(1422)
atgtctgtggaaaggtcgtttgaggcatgggaagaggtgcagcgtcacgggcaggacctggctgaccggcttgcccagggtttcagcggtttgattcatacgcatatgagccctccgcagttcgcgtggccgaaccctccgacatcgaagctcttcgatctggagtccccttcgcagagctttgggaagagggatttcgctttggcgacccaggagtatgggattaatggcgtgtccgccattttcaatattgggaaccggatcgggcaggccggggcggatttcggtgccagcttgaacgggctggttcagcagtttttccggtcgttgccggtgccggtgccattcaagcacgaggagagttcggtgagggtggagggtggggataaggggtggcagagaggaggggttgtggttgctgtgcaggaggatttggggttgcttagtgagaggttgaagaatcatgggtttgctgagagtgttagcagcggcggaagcgcggaggaagagggtggtggagggtttaaccttgggtctattggtcttctgggtaggagacaggggatcataaattttacgtcaacttatgatagcagaactcaagaagtggaaggttctttagttgcaaggggagatttgtggagagtagaggcatctcatggcggttctacgtctggaaatgaaaattcatctcttttcctggttcagcttggacctcttctctttatccgtgattcaactctcctcttgcctgttcatttgtcaaagcagcacttgctgtggtatggctatgatagaaagaatggaatgcattctctttgtccagcagtgtggtcaaaacacagaaggtggctgttaatgtccatgctttgcctgaatcccgtagcttgttcatttgtggatcttcaattccctaatgggcaactaacctacgtatctggtgagggtctaagtaccagtgctttcctacctgtttgtggaggtcttcttcaagctcagggtcaatatcctggggaaatgagattcagcttttcatgcaagaataagtggggaacaagaatcacaccaatggtgcaatggcctgacaaatcgttttctttgggtcttgctcaagccttggcctggaagcgatctggtctcatggtgaggccatccgttcaattcagtgtgtgtcctactgttggtggaagcaatccagggttgcgggcagaacttattcattcagttaaagagaaacttaatctaatttgtggatgcgctttcatgacatatccttctgcatttgcttctgtatctattggcagatcaaagtggaatggaaatgttgggaactcgggtctggttctaagagttgatgttcctctctccaccgttgggcgcccttccttctccattcagataaatagtggcattgagttttga

SEQ ID NO: 774 - protein, 473 aa, Glycine max
MSVERSFEAWEEVQRHGQDLADRLAQGFSGLIHTHMSPPQFAWPNPPTSKLFDLESPSQSFGKRDFALATQEYGINGVSAIFNIGNRIGQAGADFGASLNGLVQQFFRSLPVPVPFKHEESSVRVEGGDKGWQRGGVVVAVQEDLGLLSERLKNHGFAESVSSGGSAEEEGGGGFNLGSIGLLGRRQGIINFTSTYDSRTQEVEGSLVARGDLWRVEASHGGSTSGNENSSLFLVQLGPLLFIRDSTLLLPVHLSKQHLLWYGYDRKNGMHSLCPAVWSKHRRWLLMSMLCLNPVACSFVDLQFPNGQLTYVSGEGLSTSAFLPVCGGLLQAQGQYPGEMRFSFSCKNKWGTRITPMVQWPDKSFSLGLAQALAWKRSGLMVRPSVQFSVCPTVGGSNPGLRAELIHSVKEKLNLICGCAFMTYPSAFASVSIGRSKWNGNVGNSGLVLRVDVPLSTVGRPSFSIQINSGIEF

SEQ ID NO: 775 - DNA, 759 bp, Oryza sativa
  CDS (1)..(759)
atggtgtccgccgtctcctgcgggccacccaaggtgccaccgggccccaacatcacgacaagctacggcgacaagtggctggaagccaaggccacctggtatggtgcgcccaagggtgctggccccaaggacaacggcggcgcctgcgggtacaaggatgtcgacaaggctcccttcctcggcatgaactcctgcggcaacgaccccatcttcaaggacggcaagggctgcggctcatgcttcgagatcaagtgctccaagccggaggcctgctccgacaagcccgcccttatccacgtcaccgacatgaacgacgagcccatcgctgcctaccactttgacctctccggccttgccttcggcgccatggctaaggatggcaaggacgaagagctccgtaaggccggcatcatcgacacgcagttccgccgcgtcaagtgcaagtatcctgccgacaccaagatcaccttccacatcgagaaggcctccaaccccaactaccttgcgctgctagtcaagtacgtcgctggtgatggtgacgtcgtggaggtggaaatcaaggagaagggctccgaggagtggaaggcgctcaaggagtcatggggtgccatttggaggatagacacccccaagccgctcaagggccccttctccgtccgcgtcaccaccgagggtggcgagaagatcatcgccgaggacgccatccctgatggctggaaggccgacagcgtgtacaagtccaacgtccaggccaagtga

SEQ ID NO: 776 - protein, 252 aa, Oryza sativa
MVSAVSCGPPKVPPGPNITTSYGDKWLEAKATWYGAPKGAGPKDNGGACGYKDVDKAPFLGMNSCGNDPIFKDGKGCGSCFEIKCSKPEACSDKPALIHVTDMNDEPIAAYHFDLSGLAFGAMAKDGKDEELRKAGIIDTQFRRVKCKYPADTKITFHIEKASNPNYLALLVKYVAGDGDVVEVEIKEKGSEEWKALKESWGAIWRIDTPKPLKGPFSVRVTTEGGEKIIAEDAIPDGWKADSVYKSNVQAK

SEQ ID NO: 777 - DNA, 909 bp, Glycine max
  CDS (1)..(909)
atgacgtattacgagactgatggtggtggtcggagagaagaggtcgtgccggacgttaccctcacaatccaatccgatgatggcaatggggactatgtgaaactgagggccaacgccgacgacggttctcctccgggtgcggcggcggagctttctccgccgacgctaagagccgccgtgtggtattgggtgaaattggtggtgttgtttctattcctggggtttttggctgtggttgtgctcgtctgggtcggaccctatttcatagacaaggagattattccgattataaattgggagacagagactttcagtactccagtgttaactgttttggtgtttgcatctgtggcaatattcccaaccctacttttgccatctacaccttccatgtgggtggctggaatgacatttggttatggctttgggttcttgctaattatatctgcagcagctattggtgtatcactcccttttgtcatcggcaaactcttccaccataaaattgaagggtggctggagaagtatccgaaaaaagcttctattctaagatctgctggtggagggagctggtttcatcagttccgggctgttgcctttatcagaatttccccattcccatacttaatcttcaactattgtgctgtggcaacaaatgttaagtatgggccttatatagttgggtccttggtaggaatggtgccggaaatatttgttgcaatctatactggaatattgattcggacattagctgatgcttcatatgaaaagcattctctatctgccccacaaattattctcaatgtggcaggcttctgtataacggtggcgacaaccatctttttcacagcttatgctaggagacggcttgatgagttacaaagggaggaggatccattgttgcagtag

SEQ ID NO: 778 - protein, 302 aa, Glycine max
MTYYETDGGGRREEVVPDVTLTIQSDDGNGDYVKLRANADDGSPPGAAAELSPPTLRAAVWYWVKLVVLFLFLGFLAVVVLVWVGPYFIDKEIIPIINWETETFSTPVLTVLVFASVAIFPTLLLPSTPSMWVAGMTFGYGFGFLLIISAAAIGVSLPFVIGKLFHHKIEGWLEKYPKKASILRSAGGGSWFHQFRAVAFIRISPFPYLIFNYCAVATNVKYGPYIVGSLVGMVPEIFVAIYTGILIRTLADASYEKHSLSAPQIILNVAGFCITVATTIFFTAYARRRLDELQREEDPLLQ

SEQ ID NO: 779 - DNA, 1047 bp, Oryza sativa
  CDS (1)..(1047)
atggcgagcacgaggaggcgacgcgcgggcggcgtgccaatggcggtgatccggctcggagtggcggccatcgtcgtcctcggcgccggcgtgatcggcggcgcgcgcgcgcagctcaggatggggttctacgacgagagctgccccgcggcggagcggatcgtcggggagtacgtccggcagcacgtcggccgcgtccccaccgtcgccgccgcgctcctccggctgcactaccacgactgcttcgtcaggggctgcgacgcgtccatcctcctcaactcgaccggcaatggcggcgcggcggagaaggacgcggcgccgaaccagacgctgcgagggttcgacctcatcgaccgcgtcaagggcctcgtggaggcggcctgcccgggcgtcgtctcctgcgccgacgtcctcgcgctcgccgcccgcgacgccgtcgccgccatcggagggccgtcgtggcgcgtgccgacggggaggagggatggcacggtgtcgagcatgcaggaggcgctcgcggagatcccctcgccggcgatgagcttcccggagctcgccggcttgttcgccaccaagggcctcagcgtgcgtgaccttgtctggctgtcaggcgcgcacaccatcggcatcgcccactgctcgtccttcgccgaccgcctctacaacggcggcggcggcgccggcaatgccaacggcaacaacaccgacccgccgccgctggacgccgcctacgccgccaacctgcgtgagcgcaagtgcaggacggccggcgacggcgtggtggagatggaccccggcagccacctgacgttcgatctcggctactaccgcgcggtgctcaggcaccgcggcctgctccggtccgacgccgcgctagtcaccgacgcggcggcgcgggccgacatcgccggcgccgtggcgagcccgccggaggtgttcttccaggtgttcggccggtcgatggcgacgctgggcgcggtgcaggtcaagaccggctccgatggggagatcaggaggaactgcgctgtcgtgaacagcggccactga

SEQ ID NO: 780 - protein, 348 aa, Oryza sativa
MASTRRRRAGGVPMAVIRLGVAAIVVLGAGVIGGARAQLRMGFYDESCPAAERIVGEYVRQHVGRVPTVAAALLRLHYHDCFVRGCDASILLNSTGNGGAAEKDAAPNQTLRGFDLIDRVKGLVEAACPGVVSCADVLALAARDAVAAIGGPSWRVPTGRRDGTVSSMQEALAEIPSPAMSFPELAGLFATKGLSVRDLVWLSGAHTIGIAHCSSFADRLYNGGGGAGNANGNNTDPPPLDAAYAANLRERKCRTAGDGVVEMDPGSHLTFDLGYYRAVLRHRGLLRSDAALVTDAAARADIAGAVASPPEVFFQVFGRSMATLGAVQVKTGSDGEIRRNCAVVNSGH

SEQ ID NO: 781 - DNA, 1479 bp, Glycine max
  CDS (1)..(1479)
atggaccggcgatcccatcccacgggcaccgtcagcacccggaacatcctcttcaacaagtacgagattggaaaattgctgggacagggcaacttcgccaaggtgtaccacggcagaaacctcagcacaaacgagagcgtggccatcaaaaagtacgagattggaaaattgctgggacagggcaacttcgccaaggtgtaccacggcagaaacctcagcacaaacgagagcgtggccatcaaagtcataaaaaaggaaaggctccagaaagagaggctcgtgaagcagatcaaacgcgaggtctccgtcatgcgcctggtgcgtcacccccacatcgtcgaattaaaagaggtcatggccaacaaagccaaaatcttcatggttgtcgaatacgtcaagggaggggaactcttcgccaaggtagcaaaagggaagatgaaggaagatgtcgccagaaagtactttcagcaactcatcagcgccgtcgatttctgccacagccgcgacgtcacccaccgcgatctcaagccggagaatctgctcctcgacgagaacgaagaccttaaagtctccgactttggcctgtcggcgctaccggaccagcgcagatccgacgggatgctcctcacgccgtgcggcacgccggcctacgtggcgccggaggttctcaagaagaagggctacgatgggtcgaaggctgatatatggtcctgcggggtcatcctctttgctcttctttctggctatttgccctttcaaggtgaaaatgtgatgagaatttacagcaagtctttcaaagccgattatgcattccccgaatggatttcccctgcggccaaaaacttgatctccaatttactcgttgtggacccgcaaaagaggtattccattccagacatcatgaaggacccttggtttcaaattggcttcttgaggcccattgcgttttccatgaaggagtctgcgcttgaagataacattgatttcagcggggatgatgttcctagtcctggtagtgatgatggtaatagcagcagcaacaacgaggatggggagttgacgggggctaagcctgctcgtccgtcttacaacgcttttgagataatctcgtccttgtcgcatgggttcgatctgaggaatttgtttgagacgaggaagcggtcgccgtcaatgttcatttccaagttttcggcttcggcggtgatggcgaagctggagggggtggccaagaagctgaactttagggtgacggggaagaaggagttcatggtgaggatgcagggggcgacggaagggaggaaggggaagctggccatgacggtggaggtattcgaggtggcgccggaggtcgcggtggtcgagttctccaagtccgccggagacacgcttgaataccttaatttctgtgaggaccaagtcagaccttcgctcagggatattgtgtggagttggcaaggggacgctaattgccaccagtaa

SEQ ID NO: 782 - protein, 492 aa, Glycine max
MDRRSHPTGTVSTRNILFNKYEIGKLLGQGNFAKVYHGRNLSTNESVAIKKYEIGKLLGQGNFAKVYHGRNLSTNESVAIKVIKKERLQKERLVKQIKREVSVMRLVRHPHIVELKEVMANKAKIFMVVEYVKGGELFAKVAKGKMKEDVARKYFQQLISAVDFCHSRDVTHRDLKPENLLLDENEDLKVSDFGLSALPDQRRSDGMLLTPCGTPAYVAPEVLKKKGYDGSKADIWSCGVILFALLSGYLPFQGENVMRIYSKSFKADYAFPEWISPAAKNLISNLLVVDPQKRYSIPDIMKDPWFQIGFLRPIAFSMKESALEDNIDFSGDDVPSPGSDDGNSSSNNEDGELTGAKPARPSYNAFEIISSLSHGFDLRNLFETRKRSPSMFISKFSASAVMAKLEGVAKKLNFRVTGKKEFMVRMQGATEGRKGKLAMTVEVFEVAPEVAVVEFSKSAGDTLEYLNFCEDQVRPSLRDIVWSWQGDANCHQ

SEQ ID NO: 783 - DNA, 1449 bp, Brassica napus
  CDS (1)..(1449)
atggaatctcatgccgtttcgccagcccggaaacaacacgtagtttgcgtgccttacccagcgcaaggccatatcaacccgatgatgaaagtggctaaactcctccacgcgaaaggcttctatgtaaccttcgtcaacaccatctacaaccacaagcgtctcctccggtcccgtggatccaacgccctagacgggcttccttccttccggttcgagtccatccccgacggtctaccggagactgacgtggacgtcacacaggatatccctgccctttgcgagtccaccgtgaagaatagtctcgctccgtttaaggagcttcttcgacggatcaacgcccaagatgaatcccctccagtgagctgtattgtatcggatggctgtatgagctttactcttgatgctgctgaggagctcggtgtcccggaggttcttttctggaccactagtgcctgcggcttgttggcttacttacactaccataagttcatcgagaaagggttatctccactcaaagatgagagttacttgacaaaggagcatctagacacaattatagattggattccatcgatgaagaacctaagactaaaagacatccctagcttcatccgtacgactaaccctaacgacataatgctcaacttcctcgttcgtgagaccgaacgagccaaacgtgcttctgccatcatccttaacacgttcgacgatctcgagcttgacgtcatccaatccatgcaatctattgtacctccggtttactccattggaccgctccatctacaagtgaaacaacagatcagtgaggatagtgaactcggacgaatgggatcgaacctgtggaaagaagagacggagtgtatggattggctaaatagcagagctccaaacagcgttgtttacgttaactttggtagcataactgtgatgacagcgaagcagcttgtggacttcgcttggggtttagcagcaacgggaaaagagtttttgtgggtaatacggccggacttagtagccggtgaggtatccatggttccacctgagtttctaacggagacggcggacaggagtatgctggcgagttggtgtcctcaggaggaagtcctatctcatcccgcggtaggagggttcttaacacactgtggatggaactcgacgcttgaaagtatttgcggtggagttcctatggtttgttggccatttttcgctgagcagcaaacaaattgtaagttttgttgtgacgagtgggagattggtgttgagatcggtgatgtgaggagggaggaggttgaggcggtggttagagagttgatggatggagagaagggtaagaaaatgagagagaaggcggaggagtggcggagcttggctgagaaggcgacggagtgtaagcgtggttcgtcggttgtaaatttcgacaaggttgttaaggttgttttaggggagtaa

SEQ ID NO: 784 - protein, 482 aa, Brassica napus
MESHAVSPARKQHVVCVPYPAQGHINPMMKVAKLLHAKGFYVTFVNTIYNHKRLLRSRGSNALDGLPSFRFESIPDGLPETDVDVTQDIPALCESTVKNSLAPFKELLRRINAQDESPPVSCIVSDGCMSFTLDAAEELGVPEVLFWTTSACGLLAYLHYHKFIEKGLSPLKDESYLTKEHLDTIIDWIPSMKNLRLKDIPSFIRTTNPNDIMLNFLVRETERAKRASAIILNTFDDLELDVIQSMQSIVPPVYSIGPLHLQVKQQISEDSELGRMGSNLWKEETECMDWLNSRAPNSVVYVNFGSITVMTAKQLVDFAWGLAATGKEFLWVIRPDLVAGEVSMVPPEFLTETADRSMLASWCPQEEVLSHPAVGGFLTHCGWNSTLESICGGVPMVCWPFFAEQQTNCKFCCDEWEIGVEIGDVRREEVEAVVRELMDGEKGKKMREKAEEWRSLAEKATECKRGSSVVNFDKVVKVVLGE

SEQ ID NO: 785 - DNA, 1416 bp, Brassica napus
  CDS (1)..(1416)
atgacggatctcaaaagagaaacatccctcccgaaggagagaagcagcccaccaccacaagccctaatcctcggccgctacgaaatggggaagcttctcggccacggaaccttcgcgaaggtctacctcgctcgcaacgtgaaaacaaacgagagcgtggccatcaaagccatcgacaaggagaaagtgctcaaaggcggcttgatcgcgcacatcaaacgcgagatctccatcctccgccgcgtccgccaccccagcatcgtccagctcttcgaggtcatggccacgaaagccaagatctacttcgtgatggagtacgtccgcggaggcgagcttttcaacaaggtagccaagggacgtctcaaggaagacgccgctcgcaggtacttccagcagctgatctccgccgtcacgttctgccacgcgcgcggcgtctaccaccgcgacctcaaaccggagaatctgttgttagacgacaagggtaaccttaaagtctctgactttgggctcagcgcggtctctgatcagattcgacaagacgggcttttccacaccttctgtgggacccctgcttacgtggcgcctgaggttttagcgaggagagggtacgatgctgccaaggttgatatctggtcttgtggtgttgtgttgtttgttctgatggcgggttacctcccgtttcatgataggaacgttatggctatgtataagaagatttacagaggcgagttcagatgtccgagatggttctcgccggagctcacgaggttgatgtctcgtcttctcgagacggatccggagaaacggtttactttccttgaggttatggagaactcttggttcaagaaagggtttaagcatgtgaaattctatgtggaagatgataagctttgcaatgttgatgatgatgacgatgagttggagattgcttccgtggagtctggtcggtcttctgctgtgtctgaatccgagattgagtgtttggagcctagaaggaaggttgtggggttgcctagacccgcgagtttgaatgccttcgatattatatcgttttcgcaaggttttgacttgtcagggttgtttgatgatgatggggaaggctctaggtttgtttcaggagctccggtttcgaagatcatatcgaagttggaagagattgctaaagttgtgagctttaccgtgaggaagaaggattgtagggtgagtcttgaaggttcaagacaaggagtgaaaggtccattgacgattgcagcggagatatttgagttgacaccgtcgttggttgttgtggaggtgaagaagaaaggaggagacagagcagagtatgaagagttttgcaacaacgagttgaaacccatgttgcagaatctgagagctgatgatgttgaagagcctctgacgggtttcagcggttga

SEQ ID NO: 786 - protein, 471 aa, Brassica napus
MTDLKRETSLPKERSSPPPQALILGRYEMGKLLGHGTFAKVYLARNVKTNESVAIKAIDKEKVLKGGLIAHIKREISILRRVRHPSIVQLFEVMATKAKIYFVMEYVRGGELFNKVAKGRLKEDAARRYFQQLISAVTFCHARGVYHRDLKPENLLLDDKGNLKVSDFGLSAVSDQIRQDGLFHTFCGTPAYVAPEVLARRGYDAAKVDIWSCGVVLFVLMAGYLPFHDRNVMAMYKKIYRGEFRCPRWFSPELTRLMSRLLETDPEKRFTFLEVMENSWFKKGFKHVKFYVEDDKLCNVDDDDDELEIASVESGRSSAVSESEIECLEPRRKVVGLPRPASLNAFDIISFSQGFDLSGLFDDDGEGSRFVSGAPVSKIISKLEEIAKVVSFTVRKKDCRVSLEGSRQGVKGPLTIAAEIFELTPSLVVVEVKKKGGDRAEYEEFCNNELKPMLQNLRADDVEEPLTGFSG

SEQ ID NO: 787 - DNA, 732 bp, Glycine max
  CDS (1)..(732)
atgacaaggccaaagatttatctcttcggtgattcaatcactgaagaatctttctcggttggtggatggggtgcttctctcgcccaccatttctctcgcacggctgatgtggtgctaagaggttacagcggatacaacactcggtgggcgttgaaggtgttggagagggttttccctgcgtcacatggcggtgacggtggaaccggaacagcgccaattgctttgagtgttttctttggggccaacgacgcttgtgttccggataggtgttctgcttttcaacacgtccctctccatgaatacaagcagaatcttcactccattgtttccttcttcaagaagcgatggcccacaactcttgttctcctcataactcctcctccaatagatgaggatgcacgttgtagatatccgtatgtagaaaatccacagggtcttcctgaaaggacaaatgaagctgccggtgagtatgctagagcatgcattggtgtggctggggaatgtggaatccctgtggttgatctctggaccaaaatgcaacagtaccctgattggaataaagattatctatgtgatggtttgcatctcacgcaaagcggcaatcaagttgtttttgaggaagtaattacaaagctgagagaagaaggcttgaatctagaatctataccagttgatctcccacttattgctgatattgaccctaatgacccactgaagtcatttctgcagtaa

SEQ ID NO: 788 - protein, 243 aa, Glycine max
MTRPKIYLFGDSITEESFSVGGWGASLAHHFSRTADVVLRGYSGYNTRWALKVLERVFPASHGGDGGTGTAPIALSVFFGANDACVPDRCSAFQHVPLHEYKQNLHSIVSFFKKRWPTTLVLLITPPPIDEDARCRYPYVENPQGLPERTNEAAGEYARACIGVAGECGIPVVDLWTKMQQYPDWNKDYLCDGLHLTQSGNQVVFEEVITKLREEGLNLESIPVDLPLIADIDPNDPLKSFLQ

SEQ ID NO: 789 - DNA, 1524 bp, Brassica napus
  CDS (1)..(1524)
atgagcacagagaacattgccatgcttcgatgtgcatcagagtatctagagatgacagaggaacattctgtagaaaacctcgtttcaagatccgaagcttacttgaacgaagtagctctcaagagcttatcgagtgccatcacagtcttgcacaagtcagaggagttgttgcccattgctgaaagagtgaaactcgtgagccgttgcatcgatgccattgcttatatgacttgtcaggagagccagttctgcagtcctacgagtaataatagtaacagtgaggttgtgagcaagcagcctgtggttgactggtgggctgaagacttgactgttcttaggattgattcgtttcaacgtgttctgatagcaatgatggctagagggtttaagcagtatgggcttggtccagtgcttatgctctatgctcagaaatctcttcgaggcctggagattttcggtaaaggaacaaagaagattgaaccaaaacaagaacacgagaagagagtgattctcgaaacaatagtaagccttcttcctcgagagagaaacgcaatgtcagttagttttctctccatgcttctacgtgcagctatatacctagaaacaacggttgcttgtaggcttgacttagagaagagaatggggttacaattgccacaagcggttcttgatgatctcttgattccttcttattctttcactggagaacactccttgtttgatacggacactgttcaacgcattctcatgaactatcttgagtttgaggttgaaggagtcaggttaagcaacaatggtgttgatcttgctggtgacatggaacgtgttggtaaactgatggagacttatttggctgagatagcttctgataggaatgtgagcttgcagaagttcactggtttagctgaacttattcctgaacagtccagagttactgaagatggtatgtatcgagccgtcgacatctacttgaaggcgcatccgaatatgagtgacgtagagaggaagaaagtatgcagtttaatggattgccagaaactatcacgtgaagcatgcgctcatgcagctcagaacgatcgtcttcccgttcaaaccattgttcaagtcctttactatgaacaacaacgcctacgaggagaagtcactaacgattcagattctccagcaccaccaccaccacaacctgcagcaactgttcttccacctcctaagctcagctcctacaacgacgaactctccaaggtgaaacgcgagaaccaggacttgaaactggaacttctcaaaatgaagatgaagcttaaagagtttgagaaagaaaataatgagaagaaatcatcaacaacaacaaccatgagcagcaatcacagttctccaagatcaactgcttcaatggataagcctccattgccaagaaagtcattcataaactcggtttcaaagaaactcggaaagctaaacccttttggcatcccacctagaggaagaaccaaaccacctaaagatcggagacactctatttcttga

SEQ ID NO: 790 - protein, 507 aa, Brassica napus
MSTENIAMLRCASEYLEMTEEHSVENLVSRSEAYLNEVALKSLSSAITVLHKSEELLPIAERVKLVSRCIDAIAYMTCQESQFCSPTSNNSNSEVVSKQPVVDWWAEDLTVLRIDSFQRVLIAMMARGFKQYGLGPVLMLYAQKSLRGLEIFGKGTKKIEPKQEHEKRVILETIVSLLPRERNAMSVSFLSMLLRAAIYLETTVACRLDLEKRMGLQLPQAVLDDLLIPSYSFTGEHSLFDTDTVQRILMNYLEFEVEGVRLSNNGVDLAGDMERVGKLMETYLAEIASDRNVSLQKFTGLAELIPEQSRVTEDGMYRAVDIYLKAHPNMSDVERKKVCSLMDCQKLSREACAHAAQNDRLPVQTIVQVLYYEQQRLRGEVTNDSDSPAPPPPQPAATVLPPPKLSSYNDELSKVKRENQDLKLELLKMKMKLKEFEKENNEKKSSTTTTMSSNHSSPRSTASMDKPPLPRKSFINSVSKKLGKLNPFGIPPRGRTKPPKDRRHSIS

SEQ ID NO: 791 - DNA, 1734 bp, Glycine max
  CDS (1)..(1734)
atgaggacccgtttatcctcgactcgggtcatcttcgtggcctcgctctgtttcctcgcaagcttcgaattattgcaagccaaaaccatcgacccctacaaggttcttggggttgataaaaatgcaagtcagcgggaaattcagaaggcttttcacaagctatctcttcagtatcaccctgacaagaacaaagccaagggtgcacaagagaagttttctcagatcaataatgcatatgaacttttatccgatgaagagaagagaaagaattatgacttgtatggagatgagaaaggaaaccctggatttcatggtggccatcctggaggtcaggatggatatacttattttacagggggtggtcctggacaaagccattttaacttcaaaccagggggggactggcagggtatgggtggtcagggaggatctaagtcattctccttttcttttggcagctcgggcaattccaatccttttggatttggcttggatgatctttttggcagttttttcggtggtggaggtggtgggagtcagtttggtggttttggcagttcagccaagtctgggtccaagagttctgccaaaagtcttagagctgtaaattcacagatttacaagaaagaaatacaaaatgcaggaatgacttggcttttgttatcttatataccctcatcgaaggggatccaatactttgaatccactacagaggaggttgccagttcattgcagggagctttgaaggttggaagcataaactgtgaaaaggaagtctcattctgtaaggagcttggcatatatccacggagagctcctaggctttttgttttttcttataaggagaatgaaaaaggttctttggtggagtacagtggagacttggatgctaagaatttgaaggctttctgtcaagaacacttgccaaggttttcaaaacgaaccgacttgaatcatcttgatcaattcagcactactggaaagttgcctagggtgctgcttctttccaccaagaaggacactcctgtaatttggcgtgtccttagtggcttgtatcacaaacgcattactttcagtgatgcagagcttcatgatgttgctgatcctagagtgaaaacactagaagttgatgcacttccagctatagtaggttggctaccaaatggagaaaagcgtatcctgaaaactgggatatctgtgaaagatttaaaatctgcagttcttgatcttagtaacatacttgatagttttgaaaaagtaagtaaaaaggaatcatcaggtcaggccaagaaggcacaaactgactcagacgagggacgcataccattactttctaaatcaaactttgaggctctatgtggtgagaaaactccagtctgcataattggtgccttcagatcttctaaagctagagaaaagctagaatcaatcctctctttggtctctcaaaaatctttgtcaagacgaccaagtcagggatccagcagctctagggactccattttctatgttctcttagatgctgcgaagcaaaaatcatttctaaaggcatttgacaaaacagattataaatcatcaaataatttgttgattgcctacaaacctcggagagggaagtatagtgtatttatgggcgaaatgacaatagaggaggcagagaagttcattagctccgttctcagtggagatgtacccttcagagaaacaagtaggaagcctgtactagagtattag

SEQ ID NO: 792 - protein, 577 aa, Glycine max
MRTRLSSTRVIFVASLCFLASFELLQAKTIDPYKVLGVDKNASQREIQKAFHKLSLQYHPDKNKAKGAQEKFSQINNAYELLSDEEKRKNYDLYGDEKGNPGFHGGHPGGQDGYTYFTGGGPGQSHFNFKPGGDWQGMGGQGGSKSFSFSFGSSGNSNPFGFGLDDLFGSFFGGGGGGSQFGGFGSSAKSGSKSSAKSLRAVNSQIYKKEIQNAGMTWLLLSYIPSSKGIQYFESTTEEVASSLQGALKVGSINCEKEVSFCKELGIYPRRAPRLFVFSYKENEKGSLVEYSGDLDAKNLKAFCQEHLPRFSKRTDLNHLDQFSTTGKLPRVLLLSTKKDTPVIWRVLSGLYHKRITFSDAELHDVADPRVKTLEVDALPAIVGWLPNGEKRILKTGISVKDLKSAVLDLSNILDSFEKVSKKESSGQAKKAQTDSDEGRIPLLSKSNFEALCGEKTPVCIIGAFRSSKAREKLESILSLVSQKSLSRRPSQGSSSSRDSIFYVLLDAAKQKSFLKAFDKTDYKSSNNLLIAYKPRRGKYSVFMGEMTIEEAEKFISSVLSGDVPFRETSRKPVLEY

SEQ ID NO: 793 - DNA, 1899 bp, Glycine max
  CDS (1)..(1899)
atgaagtttatgaaacttggatctcgttcggacaccttttacactgcagagtctgtaaggacaatctcttctgaagtttcaagtgacctcataattcaagtgaaaggaactagatacctacttcacaagtttccactattgtccaaatgtttgcgcctgcaaaggttatgctcagagagttctgattctccacagcaccaaatagtccaactccctgattttccgggtggggtggaagcatttgagctgtgtgccaagttctgctatggcataaccatcaccctcagtgcttacaacattgtggccgcgcgaagcgcggccgagtacttgcagatgactgaggatgttgagaaggggaatttgatttacaagcttgatgttttcttcaactcttgcatcctcaatggctggaaggattccattgtgactctccaaaccacaaaggcattgcctttgtggtcagaggatttgacagtttccagcagatgcattgaggccattgcctcaaaggccttaagccacccctcaaaggtgagtttgtcacacagccattcccggagattgaggaatgatgtgtcttcatacaacgaaaccgaaagcctgagacacaaatcaacaagcaagggatggtgggctgaggatttagcagatttgagcatagacttgtattggagaaccatgatggctatcaaatctggtggcaagacaccctcaaatctcattggtgatgcattgaaaatttatgcatctagatggctaccaaatataaggaagaatgtgcataatgtcaagagggagactgaatcagactcagattcagattctgctagtgaagtgaattcaaagcataggctgcttttggaatcaatagtgagcttgcttccagcagagaaaggtgctgtttcttgcagcttccttcttaagctcttgaaggctgctaatattctcaatgcctctgcttcttctaaagtggaattggccacaagagtaggacttcaattggaggaagcaacggttaacgatcttctgatacgctcggtgtctaagagtactaatgatatgatgtatgaagtggacttggtgatgaccatattggaacagttcatgttgcaaggtcagagtcctccaaccagccctccaagatcaaggttggccgtcgaaagaaggcggtctcgttccgcggagaatattaacttcgagtttcaagagagtaggaggtcctcctcagcttctcatagctcaaaacttaaggtggcaaagcttgtggataggtaccttcaagaggtggccagggatgtgaatttggctctctcaaaattcattgctattgctgaaactataccagattttgcaaggcatgaccatgatgatctgtacagagctattgacatttacctcaaggcacatccagaactcagcaagagtgaaaggaagagactatgtagaattttagactgcaaaaaactgtcaatggaagcatgcatgcatgcagcacagaatgagcttcttcccctaagagttgtagtccaagttctcttctttgagcaagcaagagcagcagcagctggtggcaaagtgagtgacatgccaagcaacatcaaggcattgctcacagctcatggcattgacccttcaaagcacacagcaccattgagcaccacgactagtattcatgctgatgacaattggagtgtttctggattcaagtcaccaaagtcaacaactaggaaccctaccctcagaatgaagctagctgaggatgacttggatgaaaatgttgtgccccgtgatgagattggaagaacttctaaatttaagggtcttggtcttcccactcagcccaaacgaatgtttagcaagttgtgggctacaaacagaagtgccactgaaaagaattga

SEQ ID NO: 794 - protein, 632 aa, Glycine max
MKFMKLGSRSDTFYTAESVRTISSEVSSDLIIQVKGTRYLLHKFPLLSKCLRLQRLCSESSDSPQHQIVQLPDFPGGVEAFELCAKFCYGITITLSAYNIVAARSAAEYLQMTEDVEKGNLIYKLDVFFNSCILNGWKDSIVTLQTTKALPLWSEDLTVSSRCIEAIASKALSHPSKVSLSHSHSRRLRNDVSSYNETESLRHKSTSKGWWAEDLADLSIDLYWRTMMAIKSGGKTPSNLIGDALKIYASRWLPNIRKNVHNVKRETESDSDSDSASEVNSKHRLLLESIVSLLPAEKGAVSCSFLLKLLKAANILNASASSKVELATRVGLQLEEATVNDLLIRSVSKSTNDMMYEVDLVMTILEQFMLQGQSPPTSPPRSRLAVERRRSRSAENINFEFQESRRSSSASHSSKLKVAKLVDRYLQEVARDVNLALSKFIAIAETIPDFARHDHDDLYRAIDIYLKAHPELSKSERKRLCRILDCKKLSMEACMHAAQNELLPLRVVVQVLFFEQARAAAAGGKVSDMPSNIKALLTAHGIDPSKHTAPLSTTTSIHADDNWSVSGFKSPKSTTRNPTLRMKLAEDDLDENVVPRDEIGRTSKFKGLGLPTQPKRMFSKLWATNRSATEKN

SEQ ID NO: 795 - DNA, 1392 bp, Brassica napus
  CDS (1)..(1392)
atggagaacaaaccgagtgtcttaaccgacacatacgaggtaggtaggctactaggtcaaggcacgttcgccaaagtctactacggtcgaagcgtccacaccaacgagagcgtggcgatcaaaatgatcgacaaagagaaagtcctccgcgtggggctcagcgaccagatcaagcgcgagatctccgtcatgcgtatcgccaagcaccccaacgtggtctccctccacgaggtcatggccaccaagtcccgcatctacttcgtgatcgagtactgcaaaggcggcgagcttttcaacaaggtcaaaaaggggaagctcagggaagacgtcgcctggaagtacttccaccagctcatcaacgctgtggacttttgccatagccgcggtgtttaccaccgcgacatcaagccggagaatctcctgcttgatgacaatgagaatctcaaggtttctgacttcggtctgagcgcgctcgcggattgcaaacgcgccgatgggcttttgcataccacttgcggcacccctgcttacgtggcgcctgaggtgattaacaggaaaggttacgatgggactaaggctgatatttggtcttgtggggttgttttgttcgtgctgttggctggttacctcccctttcacgactctaatctaatggagatgtataggaagattggtaaagcggatttcaagtgtcccaactggttcgcccccgaggcgaagaggcttctgtgcaagatgctggatcctaaccacgagagtaggatcaccatctcgaggatcagggagagttcttggtttaggaaagggctgcatttgaagcagaagaagattgataaacaactccgggaaacaactgttgttattcccacggtggaagttggagagagttcgggctcgagcgagaacggagagagccaagaggcgccggctcagctcgcgtacctgaacgctttcgatatcatcagcttgtctgcggggtttgatctgggagggcttttcggggatgccaatgacaagagggagtctagattcgcgtcgaggaagcctgctgctgagatcatttctaagctggaggaggtggccagaggtttgaacctgaagataaggaagcaggacgcggggctgttcaagctcgaagggtcgaaggaaggaagaaagggagctttgtcgatggacgcggagatattccaagtgactcagacgtttcacctggttgaagtgaagaaatgtgatggggacacggtggagtatcagaggctggtggaggaggatcttaggcctgcgctgggagatgtagtctgggtttggcaaggcgataaggagaaggaagagcagctaaagcgtggtttgcaggacgaacaggaagtagaacagcatagtgaaccattgtag

SEQ ID NO: 796 - protein, 463 aa, Brassica napus
MENKPSVLTDTYEVGRLLGQGTFAKVYYGRSVHTNESVAIKMIDKEKVLRVGLSDQIKREISVMRIAKHPNVVSLHEVMATKSRIYFVIEYCKGGELFNKVKKGKLREDVAWKYFHQLINAVDFCHSRGVYHRDIKPENLLLDDNENLKVSDFGLSALADCKRADGLLHTTCGTPAYVAPEVINRKGYDGTKADIWSCGVVLFVLLAGYLPFHDSNLMEMYRKIGKADFKCPNWFAPEAKRLLCKMLDPNHESRITISRIRESSWFRKGLHLKQKKIDKQLRETTVVIPTVEVGESSGSSENGESQEAPAQLAYLNAFDIISLSAGFDLGGLFGDANDKRESRFASRKPAAEIISKLEEVARGLNLKIRKQDAGLFKLEGSKEGRKGALSMDAEIFQVTQTFHLVEVKKCDGDTVEYQRLVEEDLRPALGDVVWVWQGDKEKEEQLKRGLQDEQEVEQHSEPL

SEQ ID NO: 797 - DNA, 1161 bp, Brassica napus
  CDS (1)..(1161)
atgtcgtctccagaaaggaagaggaagaagacgaagaagaaaccgttgctggtgctcggtccgacgccggaatcgactccaattacgtcgcttcctgatgatttggtagtgagttgcttagcccgcgtctctcgattgcagtacccgactctctcgctcgtctccaagagctttcgatctctcctcgcttcaccgcatctttacgagactcggtcatctttgggccgcacagagagttgtctctacgtatgcatacgcttccctgatgagactatccctcgctggttcaccctctgccaaaaacctgagaagaagaataagaggacgaagaaggcaagtgggtatgttttagccaaactctcaactccccattctcgtcatgcgcacgggtgcagtgtcgtgacagttggttcggatatctacaacattggcggacccatagacaaggccaacgagccctcgtctagcgtctcaatcttggactgtcggtccaacacgtggcgcgaaggcccaagcatgctggtgaagcggaactacccattcgccagtgtactcgatgggaagatatatgcagctggaagctctgactctagttcctcagaatggatggaggttttcgacacaaaaacacaaacttgggagcttgtgtctagccctgttgctgcggagatgcgcgccagacgacatttacatataaaaagaatggcagggatcgacggaaaggtacacattttgggatccagtagtcgtttggcttacgatacgagggaaggtcgatgggaaagtgtggggaaggaaatgagttcgggttggggatggtattcttactgtgtggttgacaacgtgatttactattataaagagcggggagagatcaaatggtatgacagtaagggaagacgctggagagctttgaagggtgtgaaaggacttcataagatcccgcgttgtactgttacattggcggattttggtggtaagatggctgttttgtgggatagggatgtggcttccactggtgacaagatgatttggtgcacagtgattgcgctcgaaaggcacaacgatgaagagatttggggcaaggtcgagtggagtgacacagtgcttaaagtccccgagtcatgtataattaaacatgctcttgctgctaccctttga

SEQ ID NO: 798 - protein, 386 aa, Brassica napus
MSSPERKRKKTKKKPLLVLGPTPESTPITSLPDDLVVSCLARVSRLQYPTLSLVSKSFRSLLASPHLYETRSSLGRTESCLYVCIRFPDETIPRWFTLCQKPEKKNKRTKKASGYVLAKLSTPHSRHAHGCSVVTVGSDIYNIGGPIDKANEPSSSVSILDCRSNTWREGPSMLVKRNYPFASVLDGKIYAAGSSDSSSSEWMEVFDTKTQTWELVSSPVAAEMRARRHLHIKRMAGIDGKVHILGSSSRLAYDTREGRWESVGKEMSSGWGWYSYCVVDNVIYYYKERGEIKWYDSKGRRWRALKGVKGLHKIPRCTVTLADFGGKMAVLWDRDVASTGDKMIWCTVIALERHNDEEIWGKVEWSDTVLKVPESCIIKHALAATL

SEQ ID NO: 799 - DNA, 1221 bp, Brassica napus
  CDS (1)..(1221)
atgaaatcgcggtggctgaacctctcggtagaatcaagtatctccgccatttcccgatgcagttcgcgatctccaacctcaacgaacgggggagaaaactcagagccaatcccagccgacctcattttcgaacttctcttgagactcccggcgaaatctatagcgagatgtcgctgcgtatcgagcctctggtcttccatacttatccgtcctgacttcacagagctcttcttcaccagatcttcatctctcccgcagcttctcctctcccgtcaagaaaacgacgagctgctcttcttcactgcacctcaggcggtccatacctcgtctattatatccccaaatcaccataagaagatcccctttcttagtacctctcaaatctgcggccacctccgaggtttgatctgtcttacacaccagcggaccgtgaagaaaaggaaagaaacggtcccggtgatgtttaaccccagcaccggagagtccttggagttacccaaagtgaagacgagtatggttatggtgagaagctttttcgcttatgatccagttgctaagcagtttaaggtattgtcaatgagctggccatgctataaaagcggatggatatgtaaggatcatcaagttctgactttaggaaatggaaacttagcatggagaatggtcgaatgtggcataccacatcatcctacttacgatgggatatgcatcaacggctgtctctattaccaagctatagttgatcgaggttcgggggtttcagctataatttgctttgatgttaggtctgagaagtttagtttcattagaaaagctcagggtgcggctctctggcgcgaatcgactcttgtagactacaagggtagattaggtacactcacggcagatagggatgaacttactggagaaagtagatatatggagatgtggcttctagtagatgctgagaaacatgagtggtcgaggcatgtatatgtcttccccccatcgtggggcaatgtagctggagaggctcagttatactatatcggaatgtctggtaacaatgaggttttgttgtctccgcgatatccatccagccctttctatgttttctactacaatttcgagaggggaactattagaagagttgaaatccaaagaatggatgcgcttaagcatggtagaattcacacctttctagaccatgtagaggacgtgaagctttacgcaaatgtgtag

SEQ ID NO: 800 - protein, 406 aa, Brassica napus
MKSRWLNLSVESSISAISRCSSRSPTSTNGGENSEPIPADLIFELLLRLPAKSIARCRCVSSLWSSILIRPDFTELFFTRSSSLPQLLLSRQENDELLFFTAPQAVHTSSIISPNHHKKIPFLSTSQICGHLRGLICLTHQRTVKKRKETVPVMFNPSTGESLELPKVKTSMVMVRSFFAYDPVAKQFKVLSMSWPCYKSGWICKDHQVLTLGNGNLAWRMVECGIPHHPTYDGICINGCLYYQAIVDRGSGVSAIICFDVRSEKFSFIRKAQGAALWRESTLVDYKGRLGTLTADRDELTGESRYMEMWLLVDAEKHEWSRHVYVFPPSWGNVAGEAQLYYIGMSGNNEVLLSPRYPSSPFYVFYYNFERGTIRRVEIQRMDALKHGRIHTFLDHVEDVKLYANV

SEQ ID NO: 801 - DNA, 1008 bp, Oryza sativa
  CDS (1)..(1008)
atggagtacgctactcgtggagatcgcacggctagctgcctgagtttcctctgcaatatcgtcgttctgctgggcctcgccgccgcggcggcgagcgggcagctgacggacgactactacgactattgctgcccccaggtttaccgcatcgtccggtcccgcgtggccgccgcgatgaaggccgagatgcgcatgggcgcctccctgctcaggcttcacttccacgactgcttcgtcaatggctgtgacgcgtccatcctccttgacggcacaaacagcgagaagttcgcggcgccgaacaacaactcggtgagagggtacgaagtcatcgatgcgataaaggccgacctcgagagcgcctgcccgggagtcgtctcctgcgccgacatagtagcccttgcagctaaatacggagtactacttagtggaggacctgattatgatgtcctcctgggaagaagagatggtctggtggcaaatcagacgggggcgaacagtaacttgcctagccctttcgattcgatcagcgttatcactgcgaggttcaaggatgtcggtctcaacgcaaccgatgttgtggtcttatcaggggcgcacacgatcgggcgatctcgctgcctgctgttcagcaaccggctggcgaacttctcggcgaccaactccgtcgacccgacgctggactcgtcgctggcgtccagcctgcagcaggtgtgccgcggcggcgctgaccagctggcggcgctggacgtcaactccgccgacgcgttcgacaaccactactaccagaacctgctggccaacaagggcctcctcgcctccgaccagggcctcgtctccagctccggcgaccccgccgtcgccgccaccaaggcgctggtgcaggcctacagcgccaacggccagcgcttctcctgcgacttcggcaactccatggtcaagatgggcaacatcagccctctcaccggctctgccggccagattcgcaagaactgcagggccgtcaactga

SEQ ID NO: 802 - protein, 335 aa, Oryza sativa
MEYATRGDRTASCLSFLCNIVVLLGLAAAAASGQLTDDYYDYCCPQVYRIVRSRVAAAMKAEMRMGASLLRLHFHDCFVNGCDASILLDGTNSEKFAAPNNNSVRGYEVIDAIKADLESACPGVVSCADIVALAAKYGVLLSGGPDYDVLLGRRDGLVANQTGANSNLPSPFDSISVITARFKDVGLNATDVVVLSGAHTIGRSRCLLFSNRLANFSATNSVDPTLDSSLASSLQQVCRGGADQLAALDVNSADAFDNHYYQNLLANKGLLASDQGLVSSSGDPAVAATKALVQAYSANGQRFSCDFGNSMVKMGNISPLTGSAGQIRKNCRAVN

SEQ ID NO: 803 - DNA, 1758 bp, Brassica napus
  CDS (1)..(1758)
atggtgagaacgcagttggtggtatctgttgtgcttgtctcgacattgttgctgttgaatgcagaagccaaaaccgttgatccctacaaggttcttggagtatctcgagatgcaaagccgcgtgaaatccagaaagctttccacaagcaatctctgaaatatcatccagataaaaacaaaaataagggtgctcaggagaagtttgctgagattaataatgcttatgagatcttgtctgatgaagagaagaggaagaactatgatctttatggggatgaaaagggacagcctggatttggatcaggcttccccggaggtaatggtggcgggtattcatattcttcaggtggtggacagggtggtggtttcaattttggaggaccaggtggatggcagaatatgggcggtggtggtggcggtgggggcggttccaaatcgttttccttctcatttggcggtggtggtggcggtcctagtgcaagctccttcggttttgggatggatgatatattttccatgtttggcggtggtggtggtgctaaaggaagtgatcagtttggtgggttcggtggcggctcatctaaggctgagtctcggtcaaagagaagttcggttgcaactatcaaaaccgtatcatctcaggtttataagaaggaagttgtggaccaagggatgacttggcttttgctgtcttatcttccatctcaaagaggaacccagtaccatgaatctgtagtagaggaagttgctgagtcattgcaaggagcgttaaaggttgggcgtataaactgtgaaacagaatcatctctttgcaaacaacttggcgtagttcctcgtagggctccaaggctgtttgtttattcatacacatcaagtggtaaagctactttagcggaatatactgaggagcttgttgcaaagaaggtgaaaagcttctgccaggaacatttaccgagattctcaaaaagggttgacctgaataccttcgatgtctctgctgttagctcacaagggattcctagagttatgcttctgtcaacaaagaaggacactcctgtcatctggcgtgttcttagtggcttgtacaatggacgctttgtcttctacaacacagaggttcatgatgcttctgatccgaaggttaagaacctaggtgttgacgcgtttccagcgatagttggctggtcatcaaatggtgagaagcaagtcttgaagacagggatcactgtgaaaaatctgaaatcagctgtccaggagattggtaaattgctagaagggtttgagaaaaagaacaaaaaggcctcttcaaatagtcagtcaggccaagcaaagaacgagcccgtagaaaagatacatcttctctcgagaacaaatttcgattccatttgtggagagaacgttcctgtttgtatcattggtgctttcagatctccacagggtaaagagaagctgcattcaatattgtctaaggtgtcacagaagtctttgtctagacgacaagcttcgggaacaggctctcaggacacggtttcatattcccttgtagacgcggcaaaacaatcttcgttcttgagctcatttgacaaatcagagttcaaagcatctgataagctactaatagcatacaagcctaaacgaggtaagtttgctacgtttaaaggcgacatgacgatggaagaagctgagaaattcgtagcggctgttctgaacggagacatacagttcacaaagacaagacagaaacctcagatcaagtga

SEQ ID NO: 804 - protein, 585 aa, Brassica napus
MVRTQLVVSVVLVSTLLLLNAEAKTVDPYKVLGVSRDAKPREIQKAFHKQSLKYHPDKNKNKGAQEKFAEINNAYEILSDEEKRKNYDLYGDEKGQPGFGSGFPGGNGGGYSYSSGGGQGGGFNFGGPGGWQNMGGGGGGGGGSKSFSFSFGGGGGGPSASSFGFGMDDIFSMFGGGGGAKGSDQFGGFGGGSSKAESRSKRSSVATIKTVSSQVYKKEVVDQGMTWLLLSYLPSQRGTQYHESVVEEVAESLQGALKVGRINCETESSLCKQLGVVPRRAPRLFVYSYTSSGKATLAEYTEELVAKKVKSFCQEHLPRFSKRVDLNTFDVSAVSSQGIPRVMLLSTKKDTPVIWRVLSGLYNGRFVFYNTEVHDASDPKVKNLGVDAFPAIVGWSSNGEKQVLKTGITVKNLKSAVQEIGKLLEGFEKKNKKASSNSQSGQAKNEPVEKIHLLSRTNFDSICGENVPVCIIGAFRSPQGKEKLHSILSKVSQKSLSRRQASGTGSQDTVSYSLVDAAKQSSFLSSFDKSEFKASDKLLIAYKPKRGKFATFKGDMTMEEAEKFVAAVLNGDIQFTKTRQKPQIK

SEQ ID NO: 805 - DNA, 1140 bp, Brassica napus
  CDS (1)..(1140)
atggctcaagaaggtcgaaacatcatcgatgagcaggttgttgttggagaggagaaaggttcggtgagattggccacgctaaaccgccctcgtcagctaaatgtcatctcttctgaagtggtcctcaagcttgcagaatatcttgaaacctgggagaaggacgacaaaacaaagcttatactgatcaagggtgctgggagggctttctcagccggtggtgatctaaagatgttttatgacggccgtgaatcaagggattcttgccttgaggttgtttaccggatgtactggctttgctatcacatccacacatacaagaaaactcaggtttctcttgtaaatggaatatcgatgggtggaggtgcatcattgatggtcccaatgaagttctctgttgtgacagagaaaactgtatttgcaactccagaagcaagtattgggtttcatactgattgtggcttctcttacatccattcacgtcttcctggtcatttaggagagttcttggctttaactggggcgagattgaatggcaaagaacttgtagcaattggcatggcaacacattttgttccttctgctaaactggctgatctggaggaacggcttgtgggtttagactctggggagatggatgtagttcgatccacagttgaagagttctctgagaaagtagacctcgacaaagacagcatccttaacaagcagacaataattgatgagtgtttctcaaaagaaagtgtgaagcagatcatacaagcatttgaagctgaagggagcaaagaggggaatgagtggataacaccagtcatcaaaggtctaaaacgatcatctcccacaggcttgaaaataaccctacgatctattcgtgaaggtaggaaacaaacactaagtgaatgcctcaagaaggagtttaggatcactgtgaatatcttgaggagcaccatatcccctgacgtgtatgagggtataagagctctgaccatagacaaagacaattctcccaagtggagtccagcgacgttggatgaggtggctgaggagaagatcaacttggtgtttgagcccttggaggatgatattgagcttcatatccctgaaaccgaagagaacaggtggggaggcaaatacgagacttga

SEQ ID NO: 806 - protein, 379 aa, Brassica napus
MAQEGRNIIDEQVVVGEEKGSVRLATLNRPRQLNVISSEVVLKLAEYLETWEKDDKTKLILIKGAGRAFSAGGDLKMFYDGRESRDSCLEVVYRMYWLCYHIHTYKKTQVSLVNGISMGGGASLMVPMKFSVVTEKTVFATPEASIGFHTDCGFSYIHSRLPGHLGEFLALTGARLNGKELVAIGMATHFVPSAKLADLEERLVGLDSGEMDVVRSTVEEFSEKVDLDKDSILNKQTIIDECFSKESVKQIIQAFEAEGSKEGNEWITPVIKGLKRSSPTGLKITLRSIREGRKQTLSECLKKEFRITVNILRSTISPDVYEGIRALTIDKDNSPKWSPATLDEVAEEKINLVFEPLEDDIELHIPETEENRWGGKYET

SEQ ID NO: 807 - DNA, 462 bp, Brassica napus
  CDS (1)..(462)
atgggaatccaaaatcttttatggcaagtgacgaagaaagcattcactggaggtatcataggggttactatttcagatagatgttgtagcgttgttccggtgagaggagattccatgtccccgacattcaatccccagcgaaattcttatttagatgattatgttttggtagagaaattttgccttcaggattacaagtttgcgcgtggtgatgttgtagtgttcagctctccaactcatttcagggatagatacataaagaggatagtggggctgcctggggaatggataagtagttcacgggatgtgatcagagtcccagaaggacactgttgggtagaaggagataacaaagcttccagcttggactccagaacctttggtcctattcctttgggtttaattagaggacgggtgactagtgtcgtgtggcctcctcaaagggtaagcaagattagttga

SEQ ID NO: 808 - protein, 153 aa, Brassica napus
MGIQNLLWQVTKKAFTGGIIGVTISDRCCSVVPVRGDSMSPTFNPQRNSYLDDYVLVEKFCLQDYKFARGDVVVFSSPTHFRDRYIKRIVGLPGEWISSSRDVIRVPEGHCWVEGDNKASSLDSRTFGPIPLGLIRGRVTSVVWPPQRVSKIS

SEQ ID NO: 809 - DNA, 699 bp, Brassica napus
  CDS (1)..(699)
atgaggcctaagatcgttctttttggcgattccatcactgaagaatcatttggcgacggtggctggggagcttctctcgccgatcttctccgccgcaaggctgatgtggtgttacgaggatacagtggatataacacgagatgggcgttaaaagtgatggagagagtttttcaggcagcgggagacggcggagcatatccatcggcagtgactgtattttttggagccaacgatgcgtgtctgccggaaagatgctcggggtttcagcatgtgccacttctcgaatataaacagaatcttcgctcaattgtttcgtttctcaagaatcgttggccacgaacggtcattattcttataactccaccaccaatcgacgaagaggctcggctccgatatccttatatcgaaaacactataggcttgccagaaagaacaaacgaagcagcaggaacatacgcaaaaacgtgtgtagccgtagctagtgaatgccaaatcccagcgatcgatctttggtccaagatgcagcaaattccgaactggcaaattgaatgtctatggtcactacgtcttacccatatgttacaatttttgaaacagccaatctattcatctaattgttattttctaaatttcgtttgttcttttgcaatccagggacggtttacatttgagtcgggtcgggaacaaagtggtttttga

SEQ ID NO: 810 - protein, 232 aa, Brassica napus
MRPKIVLFGDSITEESFGDGGWGASLADLLRRKADVVLRGYSGYNTRWALKVMERVFQAAGDGGAYPSAVTVFFGANDACLPERCSGFQHVPLLEYKQNLRSIVSFLKNRWPRTVIILITPPPIDEEARLRYPYIENTIGLPERTNEAAGTYAKTCVAVASECQIPAIDLWSKMQQIPNWQIECLWSLRLTHMLQFLKQPIYSSNCYFLNFVCSFAIQGRFTFESGREQSGF

SEQ ID NO: 811 - DNA, 522 bp, Oryza sativa
  CDS (1)..(522)
atggcgtgtgttcaagtcatcacagtttttctctttgcattggctctagctaaaatttacccctcaacatgtcaagtggtgcagggaaaagtctcctgcgttgactgcactcacaactatgacttatctgatattaaggtttcggtgaggtgtgatggtgtgaaaaaactggctttggctactacagaaaatgatggctccttcaaggttgatcttcccctagaccacacaaaaccttcttcttctgtgaataattgcctagcaaaacttcttggtgggccagttcagctttatgtctcaagggaaaaccaggtatcccaaattatcaagggcaaagatcaaaacagctacaccatctccacttcccttagtttcaggacatcatgccccctaaccacaaaatgcaagggtgggaaacaggttggttcatcgaaaactgtggatctacctctgcctccagagtggggattggcaccaagtagctattatgttcctttcttccccatcattggaataccttga

SEQ ID NO: 812 - protein, 173 aa, Oryza sativa
MACVQVITVFLFALALAKIYPSTCQVVQGKVSCVDCTHNYDLSDIKVSVRCDGVKKLALATTENDGSFKVDLPLDHTKPSSSVNNCLAKLLGGPVQLYVSRENQVSQIIKGKDQNSYTISTSLSFRTSCPLTTKCKGGKQVGSSKTVDLPLPPEWGLAPSSYYVPFFPIIGIP

SEQ ID NO: 813 - DNA, 771 bp, Glycine max
  CDS (1)..(771)
atggttgcacctgcgaggccacagttcgttctcttcggatcctccatcgttcagcttagtttcagccatggcggttggggttcccatctttctgacatctactctcgtaaggcagacatattgttgcgaggatactatggatggaactcacgacgtgccctccaaatcctttatcaagtttttccaaaggatgctgcaacacagccttctcttgtgattgtttattttggaggtaatgattccatgggtcctcatttttctggcctaggccctcatgtgcctcttcatgaatatattgaaaacatgagaaagattctgattcatattcagggtctctctgaaaagacacgtatcattgttctcagttgtcctccagtcaatgaggaaaaagtgcgtgcaaacactagtggaatttttagtgagctggtaagaacaaatgaattgtgccaaagctactcagaagcttgtattaagctatgcaaggaactggatgtcaaagttgttgatctttttaatgcactacagaagagggatgactggatgaatgtttgtttcactgatggtatccatttggcagccgagggaagcaaaattgtggtgaaggagatactgagagtgcttaaggaggctgactgggagccatgcctccattggaaatccttgcccactgaatttgcagaagactcaccatatgatcttgttgctgctgatgggaaaactacactgaatccttccgagtggactttttacagagagattcagtgggattag

SEQ ID NO: 814 - protein, 256 aa, Glycine max
MVAPARPQFVLFGSSIVQLSFSHGGWGSHLSDIYSRKADILLRGYYGWNSRRALQILYQVFPKDAATQPSLVIVYFGGNDSMGPHFSGLGPHVPLHEYIENMRKILIHIQGLSEKTRIIVLSCPPVNEEKVRANTSGIFSELVRTNELCQSYSEACIKLCKELDVKVVDLFNALQKRDDWMNVCFTDGIHLAAEGSKIVVKEILRVLKEADWEPCLHWKSLPTEFAEDSPYDLVAADGKTTLNPSEWTFYREIQWD

SEQ ID NO: 815 - DNA, 1089 bp, Glycine max
  CDS (1)..(1089)
atggctgctgcggttagtgctgcagtctcttttccatccaccaagtctacctctctcccaagcaggacctccatcattaccccagagagagttgtattcaagaaggcttcattgcaatacagagatgtttgtagcagtggaagggtagtttccatcagagctcaagtcaccactgaggctccagccaaggttgaaaaagagtccaagaaacaggatgaaggtgtggttgtgaacaagttcaaacccaagaccccttacgttggtagatgcctgctcaacacaaagatcactggggatgatgctccaggagaaacttggcacatggtcttcagcaccgagggagagattccttacagagaaggacaatcaattggggtaattcctgatggtgttgacaagaatggcaaacctcataaactgagattgtattctattgctagcagtgccattggtgattttggagattccaagactgtttctctatgcgtgaaacggctagtgtacacaaatgaaaatggagaaattgtcaagggagtctgctcaaatttcttgtgtgacctgaagccaggagctgaagtaacaataactggacctgttgggaaagaaatgcttatgccaaaagatcctaatgccaccatcatcatgttgggaaccggaaccgggattgccccatttcgctcatttttatggaaaatgttctttgagaaacacgaagattacaagttcaatggtttggcatggctctttttgggtgtccctacaagcagctcattgctatataaggaggaatttgagaagatgcaagagaaatatcctgacaacttcaggcttgacttcgctgtgagccgagagcaaacaaacgagaacggagagaagatgtacatccaaacccgaatggctcaatatgcagaagagctgtgggaattactgaagaaggataacacttttgtgtacatgtgtggactaaaaggaatggaaaagggtattgatgacattatggtgtcattggctgccaaagatggcattgattggactgagtacaagaggcaattgaagaaatcagagcaatggaatgtcgaagtctattaa

SEQ ID NO: 816 - protein, 362 aa, Glycine max
MAAAVSAAVSFPSTKSTSLPSRTSIITPERVVFKKASLQYRDVCSSGRVVSIRAQVTTEAPAKVEKESKKQDEGVVVNKFKPKTPYVGRCLLNTKITGDDAPGETWHMVFSTEGEIPYREGQSIGVIPDGVDKNGKPHKLRLYSIASSAIGDFGDSKTVSLCVKRLVYTNENGEIVKGVCSNFLCDLKPGAEVTITGPVGKEMLMPKDPNATIIMLGTGTGIAPFRSFLWKMFFEKHEDYKFNGLAWLFLGVPTSSSLLYKEEFEKMQEKYPDNFRLDFAVSREQTNENGEKMYIQTRMAQYAEELWELLKKDNTFVYMCGLKGMEKGIDDIMVSLAAKDGIDWTEYKRQLKKSEQWNVEVY

SEQ ID NO: 817 - DNA, 1113 bp, Brassica napus
  CDS (1)..(1113)
atgaataacgaggaggcatcaccgcatgagcagaacaagatggtctctcctccgaccacggatctgtcgcttcctgatgacatacttttgagcttcctaagccgcgtttcaagactctactacccaactttctctctcgtctccaagagcttccgcactcttatcgcttcacctgaactataccagacccggtctttcctcaaccgcacagagagttgtctttacgtgtgcttgcgatcactcaccgactctaacctccgatggttcaccctctgccgtgtaccagatcgtaaactaacaaacttctcaggtggccatttactggtcccggtttcatctagccatgctcctccccctcctgctcattggtcgagtgtggtcactgttgactcgaacatatacgctatcggaggtcctatcaacgatgcgccttcctccagagtctccttcttggattgtcggtctgacacgtggcgcatggctcctcccatgcgtgtggctcgtaactaccccacggctagtgttcttgatgggaaaatatacgtagcgggaggctgcgaagattgcgattcgctgaactgtatagaggtgttcgacccaaatactcaaagttgggagtctgaggcaagtcatggcactggtggatgcgagagacttgtatacaaaggcatagggatcgaaggaaagtttcacttgttaggaggtgcgagtcatgtagcttacgaccctagagaaggtagatgggactcggtaggaacggaaatggatataggtcgagcgtgggtttcttattgtgtgataaagaacatattgttgtattatcacgaaagggatagagagttcaaatggtatgactataaaggaagattctggaggaagttgatgggtttggaaaggttggttaagtttctatgttacagccgtgttagcttggcggattatggtggtaagatggctgttttgtgggatacttttgtgcctgggagtggttctaagaacaaaatgatttggtgcgcagaggttagccttgaaagccatgacgtatatgatatttttggtgagattgagtggtttgatgttgttcttagagtttccaagtcatatactgtttaa

SEQ ID NO: 818 - protein, 370 aa, Brassica napus
MNNEEASPHEQNKMVSPPTTDLSLPDDILLSFLSRVSRLYYPTFSLVSKSFRTLIASPELYQTRSFLNRTESCLYVCLRSLTDSNLRWFTLCRVPDRKLTNFSGGHLLVPVSSSHAPPPPAHWSSVVTVDSNIYAIGGPINDAPSSRVSFLDCRSDTWRMAPPMRVARNYPTASVLDGKIYVAGGCEDCDSLNCIEVFDPNTQSWESEASHGTGGCERLVYKGIGIEGKFHLLGGASHVAYDPREGRWDSVGTEMDIGRAWVSYCVIKNILLYYHERDREFKWYDYKGRFWRKLMGLERLVKFLCYSRVSLADYGGKMAVLWDTFVPGSGSKNKMIWCAEVSLESHDVYDIFGEIEWFDVVLRVSKSYTV

SEQ ID NO: 819 - DNA, 831 bp, Glycine max
  CDS (1)..(831)
atggccaattcccttaataaccacctgtttgttgtagtatctattctttctctcttagccttttctagcaacgcacaactatctcccaccttctatgccaaaacttgccccaaccttcaaaccattgtgcgcagtgcaatgaggcaagctgttgctaaagaagccaggattggtgcctctattcttcgcttgttctttcatgattgctttgtaaatggctgtgatggatcaatcttattggacgacactgccaccttcactggcgagaaaaatgcaggacctaacagaaattcagcgaggggcttcgaagttattgataccattaaaaccaacgttgaagcttcttgcaatgccaccgtttcttgtgctgatatcctagcacttgccacaagagacggagttgtgctgctaggaggaccctcgtggagcgtcccacttggaagaagagatgcaagaacagcaagccagagtgcagccaacagccaaatcccaggaccatcctcggacctctcaaccctaacatcaatgtttgcagccaaaggcctaacctcaagtgacttaaccgtgctctctggaggccacacaataggccaagcacaatgccagttcttcaggaaccgcatatacaacgaaaccaacatagacaccaacttcgccaccaccagaaaagccaattgccctgccaccggtgggaacaccaacctggcccctctcgacaccctcacccccaaccgcttcgacaacaattacttctccgacctcgttacggccgcggccttctccactccgaccaagttctcttcaatggtgggtctcaggatgcccttgtga

SEQ ID NO: 820 - protein, 276 aa, Glycine max
MANSLNNHLFVVVSILSLLAFSSNAQLSPTFYAKTCPNLQTIVRSAMRQAVAKEARIGASILRLFFHDCFVNGCDGSILLDDTATFTGEKNAGPNRNSARGFEVIDTIKTNVEASCNATVSCADILALATRDGVVLLGGPSWSVPLGRRDARTASQSAANSQIPGPSSDLSTLTSMFAAKGLTSSDLTVLSGGHTIGQAQCQFFRNRIYNETNIDTNFATTRKANCPATGGNTNLAPLDTLTPNRFDNNYFSDLVTAAAFSTPTKFSSMVGLRMPL

SEQ ID NO: 821 - DNA, 516 bp, Brassica napus
  CDS (1)..(516)
atggcgaatcaagcagctatagcatttttctttttcgttttggcggtcttctccaacttggagctctcgtcttctacgcttttccatggcaaggtctcttgccttgactgccaccgcggtttcgacttctcaggcgttaaggttctcctaaagtgcgaaggcgagaagaaacacataaccacgatggcgacttcagacggatctttccggtcagtgcttccgaccaatgacagaaaacactccatgaactgtcttgcaaagctcttgggaggtcctgagcaactttatgctcataaacacaacatggtctctgaactggttaagtcaaaacacgataccaaggttcttactacctcaaacccactttccttctctctctcatgccctaaaccaactggagataatgtcggaaacatgataggagattcgaagactgttaattttcctgggacaggaggttttggattcccacctgctagcttctttcccttcttaccaatcattggcatcccatga

SEQ ID NO: 822 - protein, 171 aa, Brassica napus
MANQAAIAFFFFVLAVFSNLELSSSTLFHGKVSCLDCHRGFDFSGVKVLLKCEGEKKHITTMATSDGSFRSVLPTNDRKHSMNCLAKLLGGPEQLYAHKHNMVSELVKSKHDTKVLTTSNPLSFSLSCPKPTGDNVGNMIGDSKTVNFPGTGGFGFPPASFFPFLPIIGIP

SEQ ID NO: 823 - DNA, 1524 bp, Brassica napus
  CDS (1)..(1524)
atgagaggaaaatatttttctttactaatagtgttcattgtcttggccttcaatggagttcttgcccagaacaattcttcaacgcctaaattaagaagaagtgattttccagaagatttcatttttgggtctgcaacatctgcttaccaagttgaaggaggtgctcatgaagatggtagaggaccaagtatctgggataccttctctgaaaaatacccagagaagataaaggatggtagcaatgggtctgttgcagataactcttaccatctttacaaggaagatgtggctttattgcatcaaattggcttcaatgcttacagattctcaatctcgtggtcgagaatattgcctcgtgggaatctaaaaggaggaataaaccaagctggtattgactattacaacaacttgatcaatgagcttttgtccaaaggaattaagccttttgccaccatgttccattgggacacaccacaaggtcttgaagatgcttacggtggattccgtggctcagtgattgtaaacgatttccgtgattatgcggatatttgctttaagaattttggagatagagtgaagcactggatgacactgaacgagccattgacagtggtgcaacaaggctacgtcgcaggtgtaatggctccaggaagatgctccaaattcacaaaccctaactgcaccgccggagatggagccaccgagccttatatcgtcggtcacaaccttatccttgctcacggagccgccgtcgaggtctaccgaaaaaaatacaaggcatctcaaaagggtcaagttggtatcgctttgaacgcggggtggaacttgccctatacagaatcggcggaagataggttagctgcggcacgggccatggccttcacatttgactacttcatggagccactcgtaaccggtaaataccctatcgacatggtgaacaacgtaaaaggcggtcggttgcctactttcactgcacaacaatctaagatgcttaagggctcatatgatttcattggcatcaattattactcttccacttacgcaaaggatgtcccctgctccaccgaacaggttacaatgttctctgatccttgtgccagtgtcacaggtgaaagagaaggtgttcccattggtccaaaggctgcatcagattggcttttgatatatccaaagggtattcgtgatcttgtcctctatgcaaaatacaagttcaaagacccggtcatgtacataaccgaaaacgggagagatgaatttagtacggacaaaatattcctcaaagacggcgatagaatcgattactacgctcgacatctcgagatggttcaagacgcaatctcggtgggagccaacgtcaagggattttttgcgtggtctttgttggacaacttcgagtgggcaatgggatacaccgtccggttcgggttggtttatgtggatttcaaagatggatgtaagaaataccccaagaaatcggctaagtggtttaaagagttgttgaatccaaagaaaagcaattga

SEQ ID NO: 824 - protein, 507 aa, Brassica napus
MRGKYFSLLIVFIVLAFNGVLAQNNSSTPKLRRSDFPEDFIFGSATSAYQVEGGAHEDGRGPSIWDTFSEKYPEKIKDGSNGSVADNSYHLYKEDVALLHQIGFNAYRFSISWSRILPRGNLKGGINQAGIDYYNNLINELLSKGIKPFATMFHWDTPQGLEDAYGGFRGSVIVNDFRDYADICFKNFGDRVKHWMTLNEPLTVVQQGYVAGVMAPGRCSKFTNPNCTAGDGATEPYIVGHNLILAHGAAVEVYRKKYKASQKGQVGIALNAGWNLPYTESAEDRLAAARAMAFTFDYFMEPLVTGKYPIDMVNNVKGGRLPTFTAQQSKMLKGSYDFIGINYYSSTYAKDVPCSTEQVTMFSDPCASVTGEREGVPIGPKAASDWLLIYPKGIRDLVLYAKYKFKDPVMYITENGRDEFSTDKIFLKDGDRIDYYARHLEMVQDAISVGANVKGFFAWSLLDNFEWAMGYTVRFGLVYVDFKDGCKKYPKKSAKWFKELLNPKKSN

SEQ ID NO: 825 - DNA, 1017 bp, Brassica napus
  CDS (1)..(1017)
atggctgtaacaaatactcctactacttgcgatggtttattcatcgtaatcctcaccactctcgtcatctcatcttcactttttggaacttcaaatgcgcagttaaacgcaacgttttactccgggacgtgccctaacgcctctgccatcgtacgtaccactattcagcaagcccttcagtccgactctagaatcggagcaagcctcattcgtcttcattttcacgactgttttgttaatgggtgtgacgcatcgatcttgcttgacaacagtggaagcatccagagcgagaagaatgctggcccgaatgcaaactcggctagaggattcaacgttgtcgataatatcaagactgcccttgagaatgcttgtcccggcgctgtctcttgctctgacattttagctcttgcctcagaagcctcagtttctttgtcaggcgggccttcatggactgtattactgggcagaagagatagtctcacagcaaaccaagccggggcaaattcgtcaattccttctccatttgaaagccttagcaacatcacgtctaaattttcagctgtcgggctaaatacaaatgatctagtagccttatctggcgcacatacgttcggacgtgctcgatgtggagtgttcagtaacagactattcaacttcagtggctcgggaaatcctgacccaactctaaacacgacacttctaagcagtcttcaacagatatgtcctcaaaacggcaccggatcaggaatcaccaatcttgatctgagcacacctgatgcgtttgataacaattactttaccaaccttcaaagcaacaacgggcttcttcagtcggaccaagaactgttctctaccaccggttcagccacgattgcgattgttacttccttcgcaagtaaccagagtctgtttttccaggcctttgctcagtccatgatcaacatggggaatattagtcccttgacagggagtagtggagagataagactagactgtaagaaagtaaacggaagttga

SEQ ID NO: 826 - protein, 338 aa, Brassica napus
MAVTNTPTTCDGLFIVILTTLVISSSLFGTSNAQLNATFYSGTCPNASAIVRTTIQQALQSDSRIGASLIRLHFHDCFVNGCDASILLDNSGSIQSEKNAGPNANSARGFNVVDNIKTALENACPGAVSCSDILALASEASVSLSGGPSWTVLLGRRDSLTANQAGANSSIPSPFESLSNITSKFSAVGLNTNDLVALSGAHTFGRARCGVFSNRLFNFSGSGNPDPTLNTTLLSSLQQICPQNGTGSGITNLDLSTPDAFDNNYFTNLQSNNGLLQSDQELFSTTGSATIAIVTSFASNQSLFFQAFAQSMINMGNISPLTGSSGEIRLDCKKVNGS

SEQ ID NO: 827 - DNA, 1092 bp, Brassica napus
  CDS (1)..(1092)
atggctgctgctgctgctgctgctataggtgctgcagtctcatttccatcatcaaagtcttcgtcgtctctccccacaaaaacatcctttgtttcccctcaaaggattttcctcaacaacaagagcacacgagaggcgtgtagttatgggggaagagtgaaggctcaggtgacaacagaggtgccagtgaaagtagtcaaggagtcaaagaaacaggaagaaggaatagttgtcaacaaattcaaaccaaaggacccttacactggtcgatgcctcttgaacaccaggatcactggcgatgatgctcccggtgaaacctggcacatcgtcttcaccacccaaggtgaggttccatacagagaagggcaatcgataggagtgattccagaaggaattgacaagaacgggaagctccacaagctgaggttatactctatagccagcagtgccattggtgactttggagactccaaaaccgtttctctctgtgtcaagagattggtttacacaaacgaaagcggggagcttgttaagggagtctgctccaacttcttgtgcgacttgaagccgggtgatgaggcaaagatcactggaccagttggaaaggaaatgcttatgcctaaagacccaaatgccaccatcatcatgcttggaacaggaactggaatagctccatttagatcatttttgtggaaaatgttctttgaggagcacgaggactacaagttcaatggtttggcgtggctcttcttgggtgtacccacaagcagctcactgctctacaaggaggagtttgagaagatgaaggagaagaatccggaaaacttcaggctggactttgcggtgagcagggagcagactaacgacaagggagagaagatgtacatacagacaagaatggcagagtatgcacaagagctgtgggagttgctgaagaaagacaacacatttgtttacatgtgtggtctcaagggtatggagaagggtatcgatgagatcatggtctcacttgctgctaaagatgggatcgattggctagagtacaagaagcaattgaagaggagtgatcagtggaatgtggaagtttactaa

SEQ ID NO: 828 - protein, 363 aa, Brassica napus
MAAAAAAAIGAAVSFPSSKSSSSLPTKTSFVSPQRIFLNNKSTREACSYGGRVKAQVTTEVPVKVVKESKKQEEGIVVNKFKPKDPYTGRCLLNTRITGDDAPGETWHIVFTTQGEVPYREGQSIGVIPEGIDKNGKLHKLRLYSIASSAIGDFGDSKTVSLCVKRLVYTNESGELVKGVCSNFLCDLKPGDEAKITGPVGKEMLMPKDPNATIIMLGTGTGIAPFRSFLWKMFFEEHEDYKFNGLAWLFLGVPTSSSLLYKEEFEKMKEKNPENFRLDFAVSREQTNDKGEKMYIQTRMAEYAQELWELLKKDNTFVYMCGLKGMEKGIDEIMVSLAAKDGIDWLEYKKQLKRSDQWNVEVY

SEQ ID NO: 829 - DNA, 954 bp, Glycine max
  CDS (1)..(954)
atggacacaaaagtgctttcttccggagttcagtactcaaatctaccggagagttacatccgacccgagtcggagcgacctcgtctttccgaggtttcggagtgcgaggatgttccaatcatcgacttgggttgtcaaaatagagcccagattgttcaccagatcggtgaagcctgcagaaactatggttttttccaggtgattaatcacggggtggctttagaagccgcaaaggaaatggcagaggtggcacatggattcttcaagttgccagtggaggagaagctgaaattgtactctgaagacccctcaaagacaatgagactgtccactagttttaatgttaaaaaagagacggtgcataattggagggattatcttagacttcactgctatcctttggacaaatatgctcctgaatggccttctaatccaccctctttcaaggaaactgtgacagaatactgcacattagttagggaattggggttgagaatacaggagtacatatcggagagtttgggcctagaaaaagattacataaagaatgtattaggggaacaagggcagcacatggcagtgaactactatccaccatgcccagaaccagaacttacctatggattgccagggcatactgacccaaatgcactcactattctgctccaagaccttcaggtttgtggccttcaagttctcaaaaatggcaagtggctcgccgttaatcctcaacctaatgcctttgtcattaacattggcgatcaactccaggctttgagtaatgggctttataagagtgtgtggcatcgtgctgttgtcaatgttgagaaaccaaggctttctgtggcttcatttctttgtccaaatgacgaggcattgataagccctgcaaaaccactcacggaaggtggatccgaagcaatacagaggatttacatatgcagaatactataa

SEQ ID NO: 830 - protein, 317 aa, Glycine max
MDTKVLSSGVQYSNLPESYIRPESERPRLSEVSECEDVPIIDLGCQNRAQIVHQIGEACRNYGFFQVINHGVALEAAKEMAEVAHGFFKLPVEEKLKLYSEDPSKTMRLSTSFNVKKETVHNWRDYLRLHCYPLDKYAPEWPSNPPSFKETVTEYCTLVRELGLRIQEYISESLGLEKDYIKNVLGEQGQHMAVNYYPPCPEPELTYGLPGHTDPNALTILLQDLQVCGLQVLKNGKWLAVNPQPNAFVINIGDQLQALSNGLYKSVWHRAVVNVEKPRLSVASFLCPNDEALISPAKPLTEGGSEAIQRIYICRIL

SEQ ID NO: 831 - DNA, 1191 bp, Glycine max
  CDS (1)..(1191)
atggaatcgcctccgcagctgggttcaagaggggcagaaacacttaaacatatagctcctggatcatcaatttctgttgcatatcacccatcttttggaccttatgatgacctcctctttctagagcttgatgagaaacttctcccagatgttctgaatgaaagggtggtcttgagaggacagcctgatgaagatgccgttctttgtactctatccaaaacctatgctatgaagtttgttggaacttccaattctgttctgcttgtacctccagcaaatcattcggaatttagtgaaaatccacaaaagaatgatagtactaatgatgaagacaaagttgttgtacctgtactcaaagttgtatctggtaatatggagcttattgagacagcccccagacttgataagcttaaattacttctgtcagaaaagccttacaaattggaggaggatgacatgggaaatttagaagagaatcaggaatctagaataggactatataactggaattatcttgtagacaatattcaagctagtgacaaggaattattgtcgggactgcaggctctttcagcgctggagattaatgggtattggagactagtagacgagagttacatggacatgattctgggaatgcttttgaaaaatgcagtgttgaatgactggtcacttaatgctttaaatgaagatgaagttgtgagtatactggaatcagatggatttcctagggtgcttgcaaggcattgtttgcacgtatatggcaacaaagtaaatgagtgcatgcctagctttgtttggaagttggatgagaagcgagtatgcatacattttgcaagagaaatcctgaaagggggtaagagaaagttagagagtttcatggatgaatggaagcagaagattccagacggaatgcatcccacttttgatcttgtggaaggagaggtattaacagagagacttggagttgagacatgggttcgtgccttcagtgtcgcgtctttgccttccactccagccgagcgtttctccattcttttcagagagaggccaaaatgggaatggaaagatctgcagccctatatcagagatctgaaggtaccaggtctttcttcagaagggttgctactcaaatacactcgaaggacacaaccatcacctgacacagaaccagttttcagtgcaagatag

SEQ ID NO: 832 - protein, 396 aa, Glycine max
MESPPQLGSRGAETLKHIAPGSSISVAYHPSFGPYDDLLFLELDEKLLPDVLNERVVLRGQPDEDAVLCTLSKTYAMKFVGTSNSVLLVPPANHSEFSENPQKNDSTNDEDKVVVPVLKVVSGNMELIETAPRLDKLKLLLSEKPYKLEEDDMGNLEENQESRIGLYNWNYLVDNIQASDKELLSGLQALSALEINGYWRLVDESYMDMILGMLLKNAVLNDWSLNALNEDEVVSILESDGFPRVLARHCLHVYGNKVNECMPSFVWKLDEKRVCIHFAREILKGGKRKLESFMDEWKQKIPDGMHPTFDLVEGEVLTERLGVETWVRAFSVASLPSTPAERFSILFRERPKWEWKDLQPYIRDLKVPGLSSEGLLLKYTRRTQPSPDTEPVFSAR

SEQ ID NO: 833 - DNA, 1035 bp, Brassica napus
  CDS (1)..(1035)
atgttatggctcgtgttggtattagccgtccaagcagatgcagcaaagcaaagaaagaaggctaaaatccctgcattaatagttttcggagattcaataatggatactggtaacaacaacaatctctcaacttttcttaagtccaacttccctccttatggcaaagacttccccggcggattggctactggaagattttctgatggaaaagttccttctgatcttattgcggaaaaattggggttgactaagacattaccagcatacctaagtccaaatttgaagcctagaaatcttttgaaaggtataacatttgcgtctggaggaaccggttatgatccattgacagccgaaactatgtcggtgatatcagtgggggatcaactaatatatttcaaagagtatatatcaacgatcaaacgacgttatggaaaaagaaaagctcgacatatcttgaaccgcggcatttttctcgtggtttctagtagcaatgaccttgctcacacttatatagcccaatctcataaatataaccctgcatcgtatgcttctttcttggctaaatcagcagttaaattcgtaagagaattacacaagcttggagctcgaaaaattggggtgtttagtgcacttcctgttggatgtgtaccacttcaaagatcagtgcgtggaagtgtattaacaagagaatgtgttaaacccttaaacaatatggcaaaaaaattcaacgccagactttctccagcactgaaatctttagatagagagttggatggtattatcttctacgttgatgtttatgagacctttttggacatgatccaaaatcctaaaaaatacggtttcgaggtagctgatagagcttgttgcggtactggttttctcgaaatttcttatatgtgcaactcatataatccattcacatgctctaattcgtcggcatacatattttgggatagctaccatccaactgaaagagcttatcaagttatggttgataagttattcgacaaatactttagcaaagtcttttga

SEQ ID NO: 834 - protein, 344 aa, Brassica napus
MLWLVLVLAVQADAAKQRKKAKIPALIVFGDSIMDTGNNNNLSTFLKSNFPPYGKDFPGGLATGRFSDGKVPSDLIAEKLGLTKTLPAYLSPNLKPRNLLKGITFASGGTGYDPLTAETMSVISVGDQLIYFKEYISTIKRRYGKRKARHILNRGIFLVVSSSNDLAHTYIAQSHKYNPASYASFLAKSAVKFVRELHKLGARKIGVFSALPVGCVPLQRSVRGSVLTRECVKPLNNMAKKFNARLSPALKSLDRELDGIIFYVDVYETFLDMIQNPKKYGFEVADRACCGTGFLEISYMCNSYNPFTCSNSSAYIFWDSYHPTERAYQVMVDKLFDKYFSKVF

SEQ ID NO: 835 - DNA, 1281 bp, Brassica napus
  CDS (1)..(1281)
atgactccagctgcgtctccaagggaaaacatatccaaaatgtggcgtgagcttcacggttccaagaactgggagaatattcttgatcctctacatccatggctgaggagagaaataaccaaatatggagagttcgtggaatcagtctatgattctctcgattttgatcctttatctgaattctgcggaagctgtagatacaacaggaacaaactctttgaggagcttggtttaacaagacatggttacaaggtaaccaaatacatctacgccatgtctcatgtggatgtccctcagtggttcttgagctcatctttgggtgcgacgtggagcaaagactctaactggatggggtttgtcgctgtgagtggagacagagagtcattgaggatcggccggagagacattgtcgtggcctggcgtggcaccgtgactcctactgaatggttcatggatcttagaactagtaaagagcctttcgattgtgaaagtgaacatggcaagagggtggtgaaggtgcaaagcgggttcttcagcatctacaactccaaaagcgagctcgcaaggtacaataaagaaagtgcatctgagcagacaatggaggaagtgaagcggttagttaagttttttaaggaaagaggcgaagaggtgagcttaaccatcaccggtcatagccttggaggtgcattggcgcttatgaacgcttacgaggccgccagagatgttccggagttatctggtaacgtttctgtgatctcttttggtgcgccgagggtaggtaacttggcattcaaggaaaggctaaacagtttaggtgttaaagtcttgcgtgtggtgaacaagcaagacattgtccctaagcttcctggtatcgtgttcaacaaggttctaaacaaactcaaccccataacgtcgaagctaaattgggtctacaggcacgtcggaacgcagcttaagctcgatgtattcagttctccttacgtaaaacgtgattcggacttagcgggatctcataaccccgaggtgtatctccatgttttagatggcttccaccgcaagaaatcagggtttagggttaacgccaggagagacgttgcgtctgtgaacaagagtacagatatgttactggatcatctaagaatacctgagtgttggtaccaagtggcacataagggtctgattctcaacaagcagaccggccggtgggtgaagccagtccgggccccggaagacattccctctcctttatcgaccggacaaaaacctatgtatagctcgtga

SEQ ID NO: 836 - protein, 426 aa, Brassica napus
MTPAASPRENISKMWRELHGSKNWENILDPLHPWLRREITKYGEFVESVYDSLDFDPLSEFCGSCRYNRNKLFEELGLTRHGYKVTKYIYAMSHVDVPQWFLSSSLGATWSKDSNWMGFVAVSGDRESLRIGRRDIVVAWRGTVTPTEWFMDLRTSKEPFDCESEHGKRVVKVQSGFFSIYNSKSELARYNKESASEQTMEEVKRLVKFFKERGEEVSLTITGHSLGGALALMNAYEAARDVPELSGNVSVISFGAPRVGNLAFKERLNSLGVKVLRVVNKQDIVPKLPGIVFNKVLNKLNPITSKLNWVYRHVGTQLKLDVFSSPYVKRDSDLAGSHNPEVYLHVLDGFHRKKSGFRVNARRDVASVNKSTDMLLDHLRIPECWYQVAHKGLILNKQTGRWVKPVRAPEDIPSPLSTGQKPMYSS

SEQ ID NO: 837 - DNA, 1041 bp, Brassica napus
  CDS (1)..(1041)
atggcgattcggcggtcgaagctatgcatcgcattgttcgcgctctcttacgccatctgcgtcttcgccgggaagagctactacgatgtgttgcaagtgccgaaaggtgcgtctgatgaacagattaagagagcttacaggaaactcgccttgaagtatcatcccgataagaatcaaggcaacgaagaagccactcgcaaattcgccgagatcaacaacgcttatgaagtgctctcggatgaggagaagagggaggtgtataacagatatggtgaagaagggctcaaacagcatgctgctaatggtggacgtggaggtggaggaggcatgaatatgcaggacatctttagccaattttttggtggtggtggctcgatggaggaagaagagaaggttgtcaagggtgatgacgtgattgtggaacttgaggccactctagaagatttatacatgggaggctctatgaaggtatggagggaaaagaatgtaataaaaccagctcctggaaagagaaattgcaactgcagggatgaggtttatcacaggcaaattggtcctggaatgttccaacagatgacagagcaggtctgtgataaatgcccaaatgttaagttcgaacgcgaaggatactttgtcacagttgatatcgagaaagggatgaaagacggagaagaagtgtctttctacgaagatggtgaacccattctcgacggtgaccctggtgaccttaagttccgaatcaaaacagcaccacatgcccggttcaggagagatggcaacgatctacacatgaacgtcaacattacactggttgaggcgctagttggttttgagaaatcattcaaacacttggatgagcacgaagttgacatcagttccaagggaattacaaaacccaaggaagtgaagaagtttaaaggagaagggatgccactacactatagcacaaagaaaggcagcctatttgtcacatttgaggtcttgtttccttcttctctcaccgaggatcagaagaagaagattaaagaagtcttggcttaa

SEQ ID NO: 838 - protein, 346 aa, Brassica napus
MAIRRSKLCIALFALSYAICVFAGKSYYDVLQVPKGASDEQIKRAYRKLALKYHPDKNQGNEEATRKFAEINNAYEVLSDEEKREVYNRYGEEGLKQHAANGGRGGGGGMNMQDIFSQFFGGGGSMEEEEKVVKGDDVIVELEATLEDLYMGGSMKVWREKNVIKPAPGKRNCNCRDEVYHRQIGPGMFQQMTEQVCDKCPNVKFEREGYFVTVDIEKGMKDGEEVSFYEDGEPILDGDPGDLKFRIKTAPHARFRRDGNDLHMNVNITLVEALVGFEKSFKHLDEHEVDISSKGITKPKEVKKFKGEGMPLHYSTKKGSLFVTFEVLFPSSLTEDQKKKIKEVLA

SEQ ID NO: 839 - DNA, 1542 bp, Glycine max
  CDS (1)..(1542)
atgggcgattcttgtcttacttctttgtcaatggagaatcatcacccttccacgctcttgtcaatggactcaagtgcatcttctcacgaggaactggatttggagatgaatcgccaaatcatactcacccgtccgccggatattaatcttcccctctccgccgagcgcagcccaccgccacagccgtggaattctgagccctgtgatattctagatgttggtcttggtactcaaggctatgagactgagagttttctcaatctgcccaaagctggtaggaagtgcgcgaagcgtgttgatagcatatggggtgcttggtttttcttcagtttttactttaagcctgctttgaatgacaagtccaaggccaagattgtcagggacagcaacggtgtctcagggttcgataagtctgatctgaagctggatgttttcatggttcagcacgacatggaaaacatgtacatgtgggttttcaaggagaggccggagaacgcgctgggtaagatgcagctgaggagttacatgaatgggcattctcgccaaggggagcgcccgtttccgtttagtgctgacaagggttttgctcggtcccacaggatgcaacgaaagcattatagaggactatcaaaccctcaatgcgtgcatggcgttgaggttgtttccacacccaatctgatgaccctggatgaggatgatcgaaaaaggtggatagaactcactggccgagacttgaattttacaattccaactgaagcaagtgatttcagttcatggagaaatcttcccaacacggactttgagcttgagaggccacctcccccaatcaagaatggtcctaatgcacacccgaagaagctgcttaatggatctggacttaacggatctggtcttaacggatctggtcttaatggatctggacttcacctatctaaccacagtaatggtgatgggttggacctctctcctgtcagcagcaaaaagaggaaggactttttccctcatgggaatgaagaagaatgttacttggctgttaatcctccatccgatcgtattccagatatagaaatgcacccaactgagccacactggttgaatgacttcagcggggtgataaaaagtgtttatggacctgttacagctgcaaaaactatttatgaggatgaacaaggttacttgattattatcagtctgccctttgtagatcttccaagtgtgaaagtttcatggaggaacactctgactcacggtatcataaaggtttcttgtatgagcacatctcgaaagcctctcatcaagagacatgataggacattcaagcttacagatccatcgtcagagcactgccctcctggagagttcgtccgagaaatccctctttcaacccgaattcctgaagacgccaacatagaagcatactacgatgggccaggatctgtgcttgagatcctggtgccaaaacatcgcgtgggacctgaagagcatgaagtccgtgtttgcctccgccctcatctgggagggaatgatcttaagttaacttga

SEQ ID NO: 840 - protein, 513 aa, Glycine max
MGDSCLTSLSMENHHPSTLLSMDSSASSHEELDLEMNRQIILTRPPDINLPLSAERSPPPQPWNSEPCDILDVGLGTQGYETESFLNLPKAGRKCAKRVDSIWGAWFFFSFYFKPALNDKSKAKIVRDSNGVSGFDKSDLKLDVFMVQHDMENMYMWVFKERPENALGKMQLRSYMNGHSRQGERPFPFSADKGFARSHRMQRKHYRGLSNPQCVHGVEVVSTPNLMTLDEDDRKRWIELTGRDLNFTIPTEASDFSSWRNLPNTDFELERPPPPIKNGPNAHPKKLLNGSGLNGSGLNGSGLNGSGLHLSNHSNGDGLDLSPVSSKKRKDFFPHGNEEECYLAVNPPSDRIPDIEMHPTEPHWLNDFSGVIKSVYGPVTAAKTIYEDEQGYLIIISLPFVDLPSVKVSWRNTLTHGIIKVSCMSTSRKPLIKRHDRTFKLTDPSSEHCPPGEFVREIPLSTRIPEDANIEAYYDGPGSVLEILVPKHRVGPEEHEVRVCLRPHLGGNDLKLT

SEQ ID NO: 841 - DNA, 1089 bp, Oryza sativa
  CDS (1)..(1089)
atggctgctgcggttagtgctgcagtctcttttccatccaccaagtctacctctcttccaagcaggacctccctcattgccccagagagagttgtgttcaagaaggcttcattgcaaaacagagatgtttctagcagtggacgggtagtttccatcagagctcaagtcaccactgaggcaccagccaaggttgaaaaagagtccaagaaacaggatgaaggtgtggttgtgaacaagtttaaacccaagaccccttacattggtagatgcctgctcaacacaaagatcactggggatgatgctccaggagaaacttggcacatggtcttcagcaccgagggagagattccttacagagaaggacaatcaattggggtaattccagatggtattgacaagaatggcaaacctcataaactgagattgtattctattgctagcagtgccattggtgattttggagattccaaaactgtttctctatgcgtgaaacggctggtgtacacaaatgaaaatggagaaattgtcaagggagtctgctcaaatttcttgtgtgacctgaagccaggagctgaagtaacaataactggacctgttgggaaagaaatgcttatgccaaaagatccaaatgccaccatcatcatgttgggaactggaaccgggattgccccatttcgctcatttttatggaaaatgttctttgagaagcacgaagattacaagttcaatggtttggcatggctcttcttgggtgtccctacaagcagctcattgctttacaaggaggagtttgagaagatgcaagagaaaagtcctgaaaacttcaggcttgacttcgctgtgagtcgagagcaaacaaacgagaaaggggagaagatgtacatccaaacccgaatggctcaatacgcagaagagctttgggaattactgaagaaggataacacttttgtgtacatgtgtggactaaaaggaatggaaaagggaattgatgacattatggtgtcattggctgccaaagatggcattgattggactgagtacaagaggcaattgaagaaagcagagcaatggaatgtcgaagtctattaa

SEQ ID NO: 842 - protein, 362 aa, Oryza sativa
MAAAVSAAVSFPSTKSTSLPSRTSLIAPERVVFKKASLQNRDVSSSGRVVSIRAQVTTEAPAKVEKESKKQDEGVVVNKFKPKTPYIGRCLLNTKITGDDAPGETWHMVFSTEGEIPYREGQSIGVIPDGIDKNGKPHKLRLYSIASSAIGDFGDSKTVSLCVKRLVYTNENGEIVKGVCSNFLCDLKPGAEVTITGPVGKEMLMPKDPNATIIMLGTGTGIAPFRSFLWKMFFEKHEDYKFNGLAWLFLGVPTSSSLLYKEEFEKMQEKSPENFRLDFAVSREQTNEKGEKMYIQTRMAQYAEELWELLKKDNTFVYMCGLKGMEKGIDDIMVSLAAKDGIDWTEYKRQLKKAEQWNVEVY

SEQ ID NO: 843 - DNA, 960 bp, Brassica napus
  CDS (1)..(960)
atggatctgaccggagaatttgaagctagatcctacggaggtggggcgacccgggaagctacaaggcttgaatcgcttcatctcggagatgaatttcgacaattagcgctacctccggagaacgccggcgggttcacggcgttgcttgagcttccgcctacacaagccgtaaaccttctccgtttcactgattcgccgtcttcttcttctcaagcggcggccgtcaccggaatctctccaccgccgcttcactcttacgggactctgacttttccttctgactcagtcctcatggaccgagcagctcgtttctccactgagcatcaccaaaacggtaacgtttccggtacgagctcgttaccttccaactccagcgtcaaaaccgagcctgctgagaccgattcatctcaagcggtgaacaatcgatctggcaagaggaaagattccgacaagaaggctaaaagctggacgaagaagaacaaaagctctgaagagaacgagaatctgccgtatgttcatgttagagctcgccgtggtcaagcaacagatagccatagcttagcagaacgagcaagaagagagaagattaatgcacgtatgaagctgctacaagaacttgtcccaggctgtgataagattcaaggtacagctttggtgctggatgaaatcattaaccatgtccagtctttacaacgtcaagtagagatgctatcaatgagacttgcttcagtaaaccccagaatcgactttaatctagacactatattggcttcagaaaacggttccttaatggatgggagcttcaacggtaccgcaatgcaagttgtttggcctcatcaagtgactgagaccgaacagtcctatcatcaccggcaactgcaacaaccgcaacaatggccttttgatggcttgaaccagcgggcttggggaaaagaagaggatcaagatcatggccaatga

SEQ ID NO: 844 - protein, 319 aa, Brassica napus
MDLTGEFEARSYGGGATREATRLESLHLGDEFRQLALPPENAGGFTALLELPPTQAVNLLRFTDSPSSSSQAAAVTGISPPPLHSYGTLTFPSDSVLMDRAARFSTEHHQNGNVSGTSSLPSNSSVKTEPAETDSSQAVNNRSGKRKDSDKKAKSWTKKNKSSEENENLPYVHVRARRGQATDSHSLAERARREKINARMKLLQELVPGCDKIQGTALVLDEIINHVQSLQRQVEMLSMRLASVNPRIDFNLDTILASENGSLMDGSFNGTAMQVVWPHQVTETEQSYHHRQLQQPQQWPFDGLNQRAWGKEEDQDHGQ

SEQ ID NO: 845 - DNA, 1077 bp, Brassica napus
  CDS (1)..(1077)
atgtctgaaaacatggagaaatctccggagctgtcatcacttccagaggacgttatcgttgagatcgtagctcgtgtacccataagccattacccgactctcaaccgcgtttcaaagagtttcaggaaactcattgcctctcctactctctacgagaggcgatcccagctaggctacaaagaacaccgtgtctatgctgtcctccacaaccccaatactcatgttgatttcggtttctacattctccaccggaaagtcggctgcggtaaccgcttggtcatcgccgaatcacttcctctcgtgttttcccatggaagctatgtctcggttggttcgaaggtgtacgggtttagctatctagatgcgctcagcattgactgcacctctcacacggttcagcccatctctgacattcctcagcccatgattaagaaagttgttaatgtcatcgacaagaaggtttacctgattggtggttcctattttccggttgggtcgtgggacacgtggaagagtgaagtcaaggtgtttgacacagaaacacaatcatgggagcctaagttggtaacgaaagacatgcctgaagatcttggtcacttttggtatgattctgtggtgatggagggtaaggtttacatgaaaggtggcatcaagcacgactcttttgtttatgtaccagaggaaaggaaatgggaattgatggacgaggtgttgagttctaaggcctggaagggtgcatgtgtggttgatgatgtcctctactatcgcgatctgtctgagaatgttttgagggcgtatgatccaaagcagagctgttggagtgttgtcaacggtttggaggagtttttggctgtggagactgctcgttcaagttggtccacagcggtgagctatggcgagaagaagttggctctcttctttcctaaaaaacatgacggcaaacaagtcatttgctgtgctgagattgctttggaaaggcgccaaggaggagagattaggggtaagatggagtcgtgtgatgttgtgattgaggatgggctgtttgagatggccaaatttgtctctgttaccgtttga

SEQ ID NO: 846 - protein, 358 aa, Brassica napus
MSENMEKSPELSSLPEDVIVEIVARVPISHYPTLNRVSKSFRKLIASPTLYERRSQLGYKEHRVYAVLHNPNTHVDFGFYILHRKVGCGNRLVIAESLPLVFSHGSYVSVGSKVYGFSYLDALSIDCTSHTVQPISDIPQPMIKKVVNVIDKKVYLIGGSYFPVGSWDTWKSEVKVFDTETQSWEPKLVTKDMPEDLGHFWYDSVVMEGKVYMKGGIKHDSFVYVPEERKWELMDEVLSSKAWKGACVVDDVLYYRDLSENVLRAYDPKQSCWSVVNGLEEFLAVETARSSWSTAVSYGEKKLALFFPKKHDGKQVICCAEIALERRQGGEIRGKMESCDVVIEDGLFEMAKFVSVTV

SEQ ID NO: 847 - DNA, 1134 bp, Glycine max
  CDS (1)..(1134)
atggctcatttggccctgtctcagatggctgtaactgttcctgttggcaacgatttgtctcttagaagatctgcagttaaggcccctaacttgaacttttgggataaatcatgggcaccagtatttactttggacttgaagccaaacaacccaagtttaagaagtcgtcatgtggtatgcatgtccgtgcaacaagcaagtgtatccaaagttaatgtctcacctttagaattggaagatgctaaagaacctccattgaacttatacaagcctaaagaaccctatacagcaacaattgtttctgttgataggctagtggggccaaaggctcctggggaaacttgtcatattgtgattgatcacggtggaaatgttccctactgggaaggacagagttatggtgttattccaccaggtgaaaatcctaagaaacctggggctcctcataatgttcgactatattcaattgcttccacaaggtatggggacttttttgatggaaaaactgccagcttgtgtgtgcgtcgtgctgtttattatgatcctgagacaggaaaggaagatccttccaagaatggcatttgtagcaattttttgtgtaactcaaagccaggagacaaaattcagatcacaggcccgtcggggaagataatgcttttgcccgaggatgacccaaatgctacccatataatgattgccacaggcactggtgttgctccattcagaggctatctacgccgaatgttcatggaatcagtccctgcatacaagtttggtggattagcatggcttttccttggagttgccaacactgacagtcttctctatgatgatgaattcagcaaatacctcaaggattatccggacaatttccgctacaatcgagccctcagcagagaacaaaagaacaagagtgggggcaaaatgtatgttcaggataagattgaggagtacagtgatgaaatcttcaaactcctggataatggggcccacatatatttctgtggtctgaaagggatgatgccagggatccaagatacgctgaagaaggttgctgagcaaagaggagaaagttgggaagagaagctttctcaacttaagaagaacaaacaatggcatgttgaagtctattga

SEQ ID NO: 848 - protein, 377 aa, Glycine max
MAHLALSQMAVTVPVGNDLSLRRSAVKAPNLNFWDKSWAPVFTLDLKPNNPSLRSRHVVCMSVQQASVSKVNVSPLELEDAKEPPLNLYKPKEPYTATIVSVDRLVGPKAPGETCHIVIDHGGNVPYWEGQSYGVIPPGENPKKPGAPHNVRLYSIASTRYGDFFDGKTASLCVRRAVYYDPETGKEDPSKNGICSNFLCNSKPGDKIQITGPSGKIMLLPEDDPNATHIMIATGTGVAPFRGYLRRMFMESVPAYKFGGLAWLFLGVANTDSLLYDDEFSKYLKDYPDNFRYNRALSREQKNKSGGKMYVQDKIEEYSDEIFKLLDNGAHIYFCGLKGMMPGIQDTLKKVAEQRGESWEEKLSQLKKNKQWHVEVY

SEQ ID NO: 849 - DNA, 1398 bp, Brassica napus
  CDS (1)..(1398)
atgatctgttcaagcaaaggaacgatcttaatatacagaggaaaatattcaacctttagattacccgttacaggctcttccttaaattacaagaatcgatttaataacaatcttccgatcactgtcacagcttctcgacgatcatcatcatcattaccttcatcgtcaatggcggtggaaacaatgtcagatacatcaactttgcttcttacgtcgggagcaagcggccgcgttagagccctcttctccatgcgagagctcaagcgtctcgtcacgatcatccacgcgctgatcctcttcattctcctcccgtttcgcgtcgtcgtttggaggcggaggaccggagcggtggtcatcagagacgagaaacaggagaggaaggtctggtctccgccgcagatcgtcgtgaggaagaggggagccggaggaagcgaaagcggatgcagcgttgcgcctccgtcggttccggcggcggtggtggacttggaggttgcggttagacgtgagctcgcgatgaggagagtgttggaggatgacggcggcgatggaagctccgtcagagagttttcccttttcccgacgaagagaggagatacgttgtttactcagtcgtggtcacctgtttcccctaatcacaggggacttattgttctgctacatggattaaatgagcatagtggcaggtatagtgattttgcaaagcagctaaatgctaatgggttcaaggtctatggaatcgattggataggtcatggtggaagcgatggacttcatgcttatgtcccttcccttgactacgctgtcgaagatttgaaatcatttcttgaaaaggtttttacggagaatcctggactcccttgtttctgcattggacactcaacaggaggagcaatcatcctcaaggctatgctggatccaaacatcgagtctcgagtttcaggcattgtattgacttcacctgctgttggagtccaaccatcccatccaattttcactgttcttgctccaatcgttgcgttcctcctgccaaggtaccaattcagtgcagcaaacaagaaaggaatgccggtctctcgtgatccacaagctctcgtcaccaaatactctgacccgctagtcttcaccggatccatccgggttaaaaccggctacgagatccttagaatcgccgctcacttgcaacaaaacctgaacaaagtgaaagtcccttttcttgtcatgcacggtacagctgacacagtgactgaccccaacgcctctaagaggctctacgaggaagcttcttcgtcagacaaatcaatcaagctctttgacgggctgttgcacgatcttctcttcgaacctgagagagaaatcatcgctggagtcatattagattggctaaaccagcgggtttag

SEQ ID NO: 850 - protein, 465 aa, Brassica napus
MICSSKGTILIYRGKYSTFRLPVTGSSLNYKNRFNNNLPITVTASRRSSSSLPSSSMAVETMSDTSTLLLTSGASGRVRALFSMRELKRLVTIIHALILFILLPFRVVVWRRRTGAVVIRDEKQERKVWSPPQIVVRKRGAGGSESGCSVAPPSVPAAVVDLEVAVRRELAMRRVLEDDGGDGSSVREFSLFPTKRGDTLFTQSWSPVSPNHRGLIVLLHGLNEHSGRYSDFAKQLNANGFKVYGIDWIGHGGSDGLHAYVPSLDYAVEDLKSFLEKVFTENPGLPCFCIGHSTGGAIILKAMLDPNIESRVSGIVLTSPAVGVQPSHPIFTVLAPIVAFLLPRYQFSAANKKGMPVSRDPQALVTKYSDPLVFTGSIRVKTGYEILRIAAHLQQNLNKVKVPFLVMHGTADTVTDPNASKRLYEEASSSDKSIKLFDGLLHDLLFEPEREIIAGVILDWLNQRV

SEQ ID NO: 851 - DNA, 750 bp, Brassica napus
  CDS (1)..(750)
atgacgtacagcgatggcgccgataaggcggtgcctgagctgaaactgagcatcgaggatcccgagaatggagattatgtgaaattaagaggaggatctgatgaagaagaggaagaatctccggcgggatgttggatagggtcggtgacgtcagtgtggttctgggttaaattgatctccctcgtcgcttttttgggtttattggcatttgtaattatcaaatggattgctccttttttaatcgaaaaggaattgattccatttataaaatgggtgagaagcacattcagcatccgggtgctcggtcttctcctctttgcctcagttgctttattcccaagcattcttcttccttcttctccttccatgtggatggctggtctcacctttggttatggaaacggctttctattgattctgtcagctgcatcaatcggtgttactcttcctttcttaatcgggcatctcttcctccacaagatgcaagaatggttgaagcaatacccaaaaaaagcagccatacttcgagccgcaggtgaaggaacatggtttcatcagtttcaagcagtcacgttgatccgtgtctctccgtttccttacatggtttacaactactgcgcgttggccactggagttcactacggtccttacatcttaggctctcttgttggaatggttcctgagatctttgtctcaatctacacgtacatatcctctgtttatgtttctatgtttagacatgttccatag

SEQ ID NO: 852 - protein, 249 aa, Brassica napus
MTYSDGADKAVPELKLSIEDPENGDYVKLRGGSDEEEEESPAGCWIGSVTSVWFWVKLISLVAFLGLLAFVIIKWIAPFLIEKELIPFIKWVRSTFSIRVLGLLLFASVALFPSILLPSSPSMWMAGLTFGYGNGFLLILSAASIGVTLPFLIGHLFLHKMQEWLKQYPKKAAILRAAGEGTWFHQFQAVTLIRVSPFPYMVYNYCALATGVHYGPYILGSLVGMVPEIFVSIYTYISSVYVSMFRHVP

SEQ ID NO: 853 - DNA, 513 bp, Brassica napus
  CDS (1)..(513)
atgaggaggttaagagggatcaaaataagaagaccgttccaacgaatcacgagatggatcctccggaaaacccgactccgccgttcgagatacatccggttaagcccgaaccggccggtttgcaaaccaaaagccatcgcaaagctcataagctggggtcgtagtctctcatcacacagcgccaggttcctcgggtgtaagccatcaaagtccggatacataccaattgggaaggaaccggttcaaaccaaacccgacccagttccgaaaggccactcggcggtctatgtcggtaaaaaagacggcgactttcacagagttttggtgcctatcgtctactttaaccatcctctgttcggtgagcttctgagagaagcagaggaagagtttgggttttgtcaagaaggtgggatcactatcccttgtccttattcggatttcaaacgggtacagacccgaatagaatccgggtcggggttctgtaaatttccatggagccggcgccggcaataa

SEQ ID NO: 854 - protein, 170 aa, Brassica napus
MRRLRGIKIRRPFQRITRWILRKTRLRRSRYIRLSPNRPVCKPKAIAKLISWGRSLSSHSARFLGCKPSKSGYIPIGKEPVQTKPDPVPKGHSAVYVGKKDGDFHRVLVPIVYFNHPLFGELLREAEEEFGFCQEGGITIPCPYSDFKRVQTRIESGSGFCKFPWSRRRQ

SEQ ID NO: 855 - DNA, 654 bp, Oryza sativa
  CDS (1)..(654)
atggcgtaccgggcggacgacgactacgactacctcttcaaggtggtgctcatcggggactccggggtcgggaagtcgaacctgctgtcccgcttcacgcgcaacgagttcagcctcgagtccaagtccaccatcggcgtcgagttcgccacccgcagcatccacgtcgacgacaaggtcgtcaaggcccagatctgggacaccgccgggcaagaaagatatcgagctattacaagcgcatactatcgcggagcagtaggggcactcgttgtctatgatgtcacgcgacatgtcacctttgagaatgtggagaggtggatgagggagctcaaggatcacacggacgccaacatcgtgatcatgcttgtggggaacaaggcagatttgcgccaccttagggctgtctcgactgaggatgcgaaagcatttgctgagaaagagaacactttcttcatggagacgtcggccctggagtcaatgaatgtggagaatgccttcactgaagtgctcacccagatatatcatgtagtgagcaagaaggctcttgacatcggcgatgacccagctgcaccaccaaaggggcagaccatcaatgttggtggcaaagatgatgtctctgcagtgaaaaagtctgcttgttgttcatcagcgtag

SEQ ID NO: 856 - protein, 217 aa, Oryza sativa
MAYRADDDYDYLFKVVLIGDSGVGKSNLLSRFTRNEFSLESKSTIGVEFATRSIHVDDKVVKAQIWDTAGQERYRAITSAYYRGAVGALVVYDVTRHVTFENVERWMRELKDHTDANIVIMLVGNKADLRHLRAVSTEDAKAFAEKENTFFMETSALESMNVENAFTEVLTQIYHVVSKKALDIGDDPAAPPKGQTINVGGKDDVSAVKKSACCSSA

SEQ ID NO: 857 - DNA, 1506 bp, Glycine max
  CDS (1)..(1506)
atgacggaagtgcttcagttgccttcatcctcaagctgttcgcgtcgtccatgtggtagtctcacacccaatgatgggtcgcacccaatttcccttattaacgctcctcccactgtggaagatcaaagggtggaaattgaagaagaagaagagaaagaaagggaaagggagagggatcagctttctattttgacccttttgattgctacgttcaggaaatctttgattgggtgcagcaccactacaacttcttcttcttcttcttcttcttcttcttccatggagattgggtggccttccaatgtgagacacgtggcacatgtcacctttgatcgcttccatggctttctcggtttgcctgttgagttcgaacccgaagttcccaggagacctcccagcgctagtgcaaatgtttttggagtttcaacagaatctatgcagctttcttttgatgccagagggaatagtgtacctacaatactgctgttaatgcaaagacatttgtatgcacaaggaggtctgcaggctgaaggaatcttcagaattaatgctgaaaatggtcaagaggagtttgtgagggaacaattaaacagaggtgtagtaccagatggcattgatgtgcactgcttggcaggtctcataaaggcttggtttagagaactaccaactggagtattggaccctcttttgccagagcaggtgatgcaatcccagtcagaagaagaatgtgctcagcttgtgaggcttcttcctccaacagaagctgctttgctagattgggcaataaacttaatggcagatgttgctcaaatggaaaacttgaacaagatgaatgcacgtaatattgcaatggtttttgcaccaaacatgactcaaatggcagatcctttgactgctttgatgtatgcagtacaagtcatgaattttctcaagactcttgttgtgaaggcattgagagaaagagaggaatctattgtaaaatcaaatcctgttcctgaccttaattcttttgacgatgatgggaaccatagcaattcagaaatgcttgacaaggaggacagtgaaaatggaaatgattgtagcgatgacgatgaagatacagtgtttgtcactgcagagccttctcaacaaagccctagtcatcttacagaagatggttgtgaaactgaaaccgcgaccaaatccaaaagtttgccagcatctactgagaactatatttcaagtggaaataggttgctggttgacagttgtccttgcaatcttgtatctcaaatttgctctttggcaattggacttcaagactgtggcctcgctaccgggcagacaaagggggatcaagcaaaaatttgcaggagcaaaagccttcagttgagcacttatgacacggacaagtgttccagaaaggtgattcagcttccagtaaccggagctgcagagaagaaccttggaatggcaattattgagcgtataaattcgagaacggagttggctgaagcttggcgttga

SEQ ID NO: 858 - protein, 501 aa, Glycine max
MTEVLQLPSSSSCSRRPCGSLTPNDGSHPISLINAPPTVEDQRVEIEEEEEKERERERDQLSILTLLIATFRKSLIGCSTTTTSSSSSSSSSSMEIGWPSNVRHVAHVTFDRFHGFLGLPVEFEPEVPRRPPSASANVFGVSTESMQLSFDARGNSVPTILLLMQRHLYAQGGLQAEGIFRINAENGQEEFVREQLNRGVVPDGIDVHCLAGLIKAWFRELPTGVLDPLLPEQVMQSQSEEECAQLVRLLPPTEAALLDWAINLMADVAQMENLNKMNARNIAMVFAPNMTQMADPLTALMYAVQVMNFLKTLVVKALREREESIVKSNPVPDLNSFDDDGNHSNSEMLDKEDSENGNDCSDDDEDTVFVTAEPSQQSPSHLTEDGCETETATKSKSLPASTENYISSGNRLLVDSCPCNLVSQICSLAIGLQDCGLATGQTKGDQAKICRSKSLQLSTYDTDKCSRKVIQLPVTGAAEKNLGMAIIERINSRTELAEAWR

SEQ ID NO: 859 - DNA, 615 bp, Brassica napus
  CDS (1)..(615)
atggtggagggagagcagaaaccaattgcaaaacaatccaagacgctatttgctggacgtcttccctttcacattgaaaaatctgacttagagaagttcttcaaagaagttggtgaaatcaaagatgttagacttgccaagggaatcgcacatgtagagtttgcttctgaagaagcagctcagaaggcattgaaactgaatggtgaaccattactaggccgcaatattttacttgattttgctaacgcgaagcctgctccacgtccacgaaacctagtcaaaacgatttttgttacaggattcaacaagtctctgagtgaagatgaaatgaaaactgccttgagagctcattttagtgcttgtggagagatcaaaaggatctctcttccttattaccaagagactggtgatagcaagggggtggcttacctagattttggtgaggatggattcaacaaggcaatggaactaaacggaagtgaagtaggaggacggaacatagtggtgattgaagctagaccaaaagaaaagaatgctgatcgagatagtggacgtggcaatgatgacagctccaagaaaggacctggaagaggcaatggtgagatgagaccgtag

SEQ ID NO: 860 - protein, 204 aa, Brassica napus
MVEGEQKPIAKQSKTLFAGRLPFHIEKSDLEKFFKEVGEIKDVRLAKGIAHVEFASEEAAQKALKLNGEPLLGRNILLDFANAKPAPRPRNLVKTIFVTGFNKSLSEDEMKTALRAHFSACGEIKRISLPYYQETGDSKGVAYLDFGEDGFNKAMELNGSEVGGRNIVVIEARPKEKNADRDSGRGNDDSSKKGPGRGNGEMRP

SEQ ID NO: 861 - DNA, 1728 bp, Glycine max
  CDS (1)..(1728)
atgtatcgcttggcttctaacctcgcttccaaagcaaggattgctaggagtagcagccaacagattggaagtaggctgagtttgagcagaaactatgcggctaaagacattaaatttggtgtggaggctcgggctctgatgcttaagggtgttgaagagcttgctgatgctgtcaaagtaaccatgggtcccaagggccgtaatgttgtgattgagcaaagttttggtgcccctaaagtaaccaaagatggagtaactgttgcaaagagcattgaattcaaggataaagttaagaatgttggtgccagtcttgtaaagcaggttgctaatgctactaatgatgtggctggtgatggaaccacatgtgctacagtccttacacgagcaatatttactgaaggctgcaaatcaatcgcggctggaatgaatgcaatggacctgaggcggggtataagtatggctgtcgatgctgtggtcacaaatttgaaaagcagagctaggatgattagcacatctgaagaaatagcgcaggttgggatgatatctgctaatggagagagagaaattggtgagttgattgcaaaagctatggagaaagttggcaaagagggagtaatcacaatttcagatggcaaaacattatataatgagttggaagttgttgaaggaatgaagctcgacaggggctacatatctccttatttcattacaaacgataagaaccagaaatgtgaacttgaagatccccttattctaattcatgagaagaaaatctctagtataaatgctatagttaaagtcttagagttggctttgaagagacaaagacctttattgattattgccgaggatgtggaaagtgatgcacttgcaactcttattctaaataagcttcgggccggaattaaggtgtgtgctattaaagcccctggttttggtgaaaataggaaggctggtcttcaagatcttgcagttctcacaggaggagcacttattactgaagagcttggcttgaagcttgaaaaagtggatttggatatgcttggtacctgtaaaaaaataacagtttctaaggatgacactgtcattcttgatggagcgggtgacaagaaagcacttgaggaaagatgcgagcagattaggtcagcaattgaaaacagtacctcagattatgacaaggaaaagttacaggaaagattagccaagctttctggtggtgttgcagtgcttaagattggaggagccagtgaagctgaagttggtgagaagaaggatagagtgactgatgcattaaatgcaactaaggctgctgtagaggagggcatagtgcctggtggtggtgttgctcttctatatgcatcgagagagttggataaacttcaaactgctaacttcggtcaaaagattggtgtccagattatccaaaatgctttaaagacacctgtgctcactattgcatcaaatgcgggagttgagggtgcagttgttgttggcaaactattggagcaggagaatcatgatctaggatatgatgcagccaaaggtgaatatgttgatatggttaaagctggaatcatagaccccttgaaggtgattaggacagccttggttgatgcagccagtgtatcgtctttgatgacaacaactgaagctgttgtgtctgaacttccaaacgataataaagatactccagctatggctggtggcatgggtggcatgggttattga

SEQ ID NO: 862 - protein, 575 aa, Glycine max
MYRLASNLASKARIARSSSQQIGSRLSLSRNYAAKDIKFGVEARALMLKGVEELADAVKVTMGPKGRNVVIEQSFGAPKVTKDGVTVAKSIEFKDKVKNVGASLVKQVANATNDVAGDGTTCATVLTRAIFTEGCKSIAAGMNAMDLRRGISMAVDAVVTNLKSRARMISTSEEIAQVGMISANGEREIGELIAKAMEKVGKEGVITISDGKTLYNELEVVEGMKLDRGYISPYFITNDKNQKCELEDPLILIHEKKISSINAIVKVLELALKRQRPLLIIAEDVESDALATLILNKLRAGIKVCAIKAPGFGENRKAGLQDLAVLTGGALITEELGLKLEKVDLDMLGTCKKITVSKDDTVILDGAGDKKALEERCEQIRSAIENSTSDYDKEKLQERLAKLSGGVAVLKIGGASEAEVGEKKDRVTDALNATKAAVEEGIVPGGGVALLYASRELDKLQTANFGQKIGVQIIQNALKTPVLTIASNAGVEGAVVVGKLLEQENHDLGYDAAKGEYVDMVKAGIIDPLKVIRTALVDAASVSSLMTTTEAVVSELPNDNKDTPAMAGGMGGMGY

SEQ ID NO: 863 - DNA, 1044 bp, Glycine max
  CDS (1)..(1044)
atgaattcccttcgtctcagttttttctgtgtggtggtagttcttggagcattaccctacttctcatatgcacaactagatccctcgttttacgctagcacatgttcaaatttgagttcaatcgtacgtgaggtgctcacaaatgtttccctgtctgatccccgcatgcctgccagtctcatcaggctccactttcacgactgttttgttcaaggttgtgatgcatcaattctgttgaaccaaacggatgagatcgatagtgagcaaactgcttttccaaatgacaactccataagagggttggatgttgtgaacgagatcaagaccaggttggaaaatgcttgtcctggcatagtttcttgtgctgatattcttgcccttgcagctgaaatatcttctgagctggctggtggtcctgtttgggaagttccactgggaagaagggatggtttttcagcaaatcaaacacttgctaatgaaaatcttcctgctcctagtcttagcattgatcaacttatatccgcatttgctaatcaaggcctcaacattactgatctagttgcactttcaggtgctcatacaattggtagagctcaatgcaagtttattgttgatcgattatacgatttcaatggcaccggcaatccagatcctactctcaacacaacttacttacaatcattgcaagtaatatgtcccgatggtggacctggctctgatctcaccaatttggacttaaccactcctgacacgttggactcaagttactactccaatcttcaacttcaaaatggcttgcttcagagtgaccaagagcttcttagcgcaaacgatactgacattgttgccattgtcaacagtttcactagtaaccaaacttttttctttgaaaactttgcagcatcaatgattaaaatggccagcattggagtgctaacgggatcagatggagaaattcgaacacaatgtaattttgtgaacggaaattcttctgctcttaccaccaaagaatcttcacaagatggcatggttagctcaatgtaa

SEQ ID NO: 864 - protein, 347 aa, Glycine max
MNSLRLSFFCVVVVLGALPYFSYAQLDPSFYASTCSNLSSIVREVLTNVSLSDPRMPASLIRLHFHDCFVQGCDASILLNQTDEIDSEQTAFPNDNSIRGLDVVNEIKTRLENACPGIVSCADILALAAEISSELAGGPVWEVPLGRRDGFSANQTLANENLPAPSLSIDQLISAFANQGLNITDLVALSGAHTIGRAQCKFIVDRLYDFNGTGNPDPTLNTTYLQSLQVICPDGGPGSDLTNLDLTTPDTLDSSYYSNLQLQNGLLQSDQELLSANDTDIVAIVNSFTSNQTFFFENFAASMIKMASIGVLTGSDGEIRTQCNFVNGNSSALTTKESSQDGMVSSM

SEQ ID NO: 865 - DNA, 834 bp, Glycine max
  CDS (1)..(834)
atggctcttacacctcaacgtgcattatctcaactacccatcctagtagctatactctcaatattcttagttatcccttccttttgtttcaaccctaaaatgctttataatgcttcatattatcctccatctggttcagattggtcaccttcggtggccacttggtatggacctgccaatggagatggaagtgaaggtggagcctgtggatatggcaacgccgttgggcaacctccattttcttctttaatatccgcgggaagccctcttatatatgactcgggcaaagggtgtggatcttgctatgaggtgaagtgcacagggaattctgcatgctcaggcaaccccgtgaaagtagtcatcactgatgagtgtgctgggtgtggctcagatgctcaatatcattttgatctgagtggcagtgcttttggagcaatggcagtttcaggtcaagatgagaatctacgtaatgcaggaaaaataaacattcagcacagaagaattgaatgcaactatcccggtaggtcaatagctttccacgtggactctggctcaaaccaagaatattttgctaccttggttgaatatgaggatggggatggtgaccttgccaaggttgaactcaaggaagcacttgattcagggtcatgggattccatgcaacaatcatggggtgcagtttggaaaattgacaagggctcaccactgagagcaccattctctatcaagctaaccacacttgagtctggcaaaacgattgtggccaacaatgtgatccctgcaggatggacacctggtcaaacttacagatcaattgtgaattttgcaacctaa

SEQ ID NO: 866 - protein, 277 aa, Glycine max
MALTPQRALSQLPILVAILSIFLVIPSFCFNPKMLYNASYYPPSGSDWSPSVATWYGPANGDGSEGGACGYGNAVGQPPFSSLISAGSPLIYDSGKGCGSCYEVKCTGNSACSGNPVKVVITDECAGCGSDAQYHFDLSGSAFGAMAVSGQDENLRNAGKINIQHRRIECNYPGRSIAFHVDSGSNQEYFATLVEYEDGDGDLAKVELKEALDSGSWDSMQQSWGAVWKIDKGSPLRAPFSIKLTTLESGKTIVANNVIPAGWTPGQTYRSIVNFAT

SEQ ID NO: 867 - DNA, 1227 bp, Brassica napus
  CDS (1)..(1227)
atggtggaagatatcgctaagagatggaaggaattgagcggcaatagcaaatggaaagacctgcttgatcctcttgacttggatctacgccgttacatcctccactacggccacatggttgaagtcgggtacatcaccttcaattatggccgccggtccaaatacgtaggagatagctgctacaccaaggaagagctatttgctcgtaccggttaccttaaagacaaccctttcaggtacgaggtgactaagttcatatatggaacatcgtcgataaagttaccagaatgtttcatgatcaactcatggtcaagggaagcatggaacaaagagtctaactggttaggttatgtcgcggtggctacagacgagtgcaaggagttgttagggagaagagacattgttgtagcatggcgagggactattcaactgtatgagtgggctaacgattttgatttcccacttgaatcagctatctcggttttccctcgagctgacccgagtgacccacctcgcattgccagtggttggctgtctctttatacaaccgctgatccacgctcacgttttgacaaaaccagtgcacgagaacaggttcaaggagagctcaaaaggttactcgaattgtacaaacatgaagaagttagcatcaccttaacaggccatagcttgggagcagttctctcaattctgtcagccacagactttctccataacgaatggccaaagaccacaccaaggcttgaagacaggctctcttgtgtcacggttttcgctttcggaagcccccgcgtcggtgaccgcaacttcaaaacactcgtggagtctctaaaaaaactcaacatcttgagagtagcaaatgtccctgatctcatcccgcattacccgctgttcaggttcacagatgttggggaggagctccatatcaacacattgaaagcagagtacctgaaacggtctctaagcctagcgcatttccataacctcaaggcgtacttgcaaggcgtggaggggacgcaacacaatcaatcggaactcaagctggagcagctggttaaaaatggtttagatgctcttgaagataagtacttagtccctggggattcgtgggttcttgagaacaaagggatggataaaactcatgacgggacatggattctcaattgcgatatggcaaaggaggacgaaaacgaagaagaagacaaatgtgaattaccatggatataa

SEQ ID NO: 868 - protein, 408 aa, Brassica napus
MVEDIAKRWKELSGNSKWKDLLDPLDLDLRRYILHYGHMVEVGYITFNYGRRSKYVGDSCYTKEELFARTGYLKDNPFRYEVTKFIYGTSSIKLPECFMINSWSREAWNKESNWLGYVAVATDECKELLGRRDIVVAWRGTIQLYEWANDFDFPLESAISVFPRADPSDPPRIASGWLSLYTTADPRSRFDKTSAREQVQGELKRLLELYKHEEVSITLTGHSLGAVLSILSATDFLHNEWPKTTPRLEDRLSCVTVFAFGSPRVGDRNFKTLVESLKKLNILRVANVPDLIPHYPLFRFTDVGEELHINTLKAEYLKRSLSLAHFHNLKAYLQGVEGTQHNQSELKLEQLVKNGLDALEDKYLVPGDSWVLENKGMDKTHDGTWILNCDMAKEDENEEEDKCELPWI

SEQ ID NO: 869 - DNA, 30 bp, Artificial
  primer
atagaattcccaccgggcacattgagcaat

SEQ ID NO: 870 - DNA, 29 bp, Artificial
  primer
atagtcgaccaccgggcacattgagcaat

SEQ ID NO: 871 - DNA, 29 bp, Artificial
  primer
atagtcgacatgcttcgactgatcgacga

SEQ ID NO: 872 - DNA, 29 bp, Artificial
  primer
atagaattccaccgggcacattgagcaat

SEQ ID NO: 873 - DNA, 29 bp, Artificial
  primer
atacccgggatgcttcgactgatcgacga

SEQ ID NO: 874 - DNA, 29 bp, Artificial
  primer
atatctagacaccgggcacattgagcaat

SEQ ID NO: 875 - DNA, 29 bp, Artificial
  primer
atagtcgacatgcttcgactgatcgacga

SEQ ID NO: 876 - DNA, 29 bp, Artificial
  primer
atagaattcatgcttcgactgatcgacga

1. A transformed plant cell with tolerance and/or resistance to an environmental stress as compared to a corresponding non-transformed wild type plant cell, wherein the tolerance and/or resistance to an environmental stress is increased by an inactivated or down-regulated gene.

2. The transformed plant cell of claim 1, wherein the tolerance and/or resistance to an environmental stress is increased by one or more inactivated or down-regulated gene encoded by one or more nucleic acid sequence selected from the group consisting of:
a) a nucleic acid molecule encoding the polypeptide according to SEQ ID NO: 2, 4, 6, 8, 10, 12, 14, 16, 18, 20, 22, 24, 26, 28, 30, 32, 34, 36, 38, 40, 42, 44, 46, 48, 50, 52, 54, 56, 58, 60, 62, 64, 66, 68, 70, 72, 74, 76, 78, 80 and/or 82
and/or 96, 98, 100, 102, 104, 106, 108, 110, 112, 114, 116, 118, 120, 122, 124, 126, 128, 130, 132, 134, 136, 138, 140, 142, 144, 146, 148, 150, 152, 154, 156, 158, 160, 162, 164, 166, 168, 170, 172, 174, 176, 178, 180, 182, 184, 186, 188, 190, 192, 194, 196, 198, 200, 202, 204, 206, 208, 210, 212, 214, 216, 218, 220, 222, 224, 226, 228, 230, 232, 234, 236, 238, 240, 242, 244, 246, 248, 250, 252, 254, 256, 258, 260, 262, 264, 266, 268, 270, 272, 274, 276, 278, 280, 282, 284, 286, 288, 290, 292, 294, 296, 298, 300, 302, 304, 306, 308, 310, 312, 314, 316, 318, 320, 322, 324, 326, 328, 330, 332, 334, 336, 338, 340, 342, 344, 346, 348, 350, 352, 354, 356, 358, 360, 362, 364, 366, 368, 370, 372, 374, 376, 378, 380, 382, 384, 386, 388, 390, 392, 394, 396, 398, 400, 402, 404, 406, 408, 410, 412, 414, 416, 418, 420, 422, 424, 426, 428, 430, 432, 434, 436, 438, 440, 442, 444, 446, 448, 450, 452, 454, 456, 458, 460, 462, 464, 466, 468, 470, 472, 474, 476, 478, 480, 482, 484, 486, 488, 490, 492, 494, 496, 498, 500, 502, 504, 506, 508, 510, 512, 514, 516, 518, 520, 522, 524, 526, 528, 530, 532, 534, 536, 538, 540, 542, 544, 546, 548, 550, 552, 554, 556, 558, 560, 562, 564, 566, 568, 570, 572, 574, 576, 578, 580, 582, 584, 586, 588, 590, 592, 594, 596, 598, 600, 602, 604, 606, 608, 610, 612, 614, 616, 618, 620, 622, 624, 626, 628, 630, 632, 634, 636, 638, 640, 642, 644, 646, 648, 650, 652, 654, 656, 658, 660, 662, 664, 666, 668, 670, 672, 674, 676, 678, 680, 682, 684, 686, 688, 690, 692, 694, 696, 698, 700, 702, 704, 706, 708, 710, 712, 714, 716, 718, 720, 722, 724, 726, 728, 730, 732, 734, 736, 738, 740, 742, 744, 746, 748, 750, 752, 754, 756, 758, 760, 762, 764, 766, 768, 770, 772, 774, 776, 778, 780, 782, 784, 786, 788, 790, 792, 794, 796, 798, 800, 802, 804, 806, 808, 810, 812, 814, 816, 818, 820, 822, 824, 826, 828, 830, 832, 834, 836, 838, 840, 842, 844, 846, 848, 850, 852, 854, 856, 858, 860, 862, 864, 866 and/or 868;
b) a nucleic acid molecule comprising the nucleic acid sequence of SEQ ID NO: 1, 3, 5, 7, 9, 11, 13, 15, 17, 19, 21, 23, 25, 27, 29, 31, 33, 35, 37, 39, 41, 43, 45, 47, 49, 51, 53, 55, 57, 59, 61, 63, 65, 67, 69, 71, 73, 75, 77, 79 and/or 81
and/or 95, 97, 99, 101, 103, 105, 107, 109, 111, 113, 115, 117, 119, 121, 123, 125, 127, 129, 131, 133, 135, 137, 139, 141, 143, 145, 147, 149, 151, 153, 155, 157, 159, 161, 163, 165, 167, 169, 171, 173, 175, 177, 179, 181, 183, 185, 187, 189, 191, 193, 195, 197, 199, 201, 203, 205, 207, 209, 211, 213, 215, 217, 219, 221, 223, 225, 227, 229, 231, 233, 235, 237, 239, 241, 243, 245, 247, 249, 251, 253, 255, 257, 259, 261, 263, 265, 267, 269, 271, 273, 275, 277, 279, 281, 283, 285, 287, 289, 291, 293, 295, 297, 299, 301, 303, 305, 307, 309, 311, 313, 315, 317, 319, 321, 323, 325, 327, 329, 331, 333, 335, 337, 339, 341, 343, 345, 347, 349, 351, 353, 355, 357, 359, 361, 363, 365, 367, 369, 371, 373, 375, 377, 379, 381, 383, 385, 387, 389, 391, 393, 395, 397, 399, 401, 403, 405, 407, 409, 411, 413, 415, 417, 419, 421, 423, 425, 427, 429, 431, 433, 435, 437, 439, 441, 443, 445, 447, 449, 451, 453, 455, 457, 459, 461, 463, 465, 467, 469, 471, 473, 475, 477, 479, 481, 483, 485, 487, 489, 491, 493, 495, 497, 499, 501, 503, 505, 507, 509, 511, 513, 515, 517, 519, 521, 523, 525, 527, 529, 531, 533, 535, 537, 539, 541, 543, 545, 547, 549, 551, 553, 555, 557, 559, 561, 563, 565, 567, 569, 571, 573, 575, 577, 579, 581, 583, 585, 587, 589, 591, 593, 595, 597, 599, 601, 603, 605, 607, 609, 611, 613, 615, 617, 619, 621, 623, 625, 627, 629, 631, 633, 635, 637, 639, 641, 643, 645, 647, 649, 651, 653, 655, 657, 659, 661, 663, 665, 667, 669, 671, 673, 675, 677, 679, 681, 683, 685, 687, 689, 691, 693, 695, 697, 699, 701, 703, 705, 707, 709, 711, 713, 715, 717, 719, 721, 723, 725, 727, 729, 731, 733, 735, 737, 739, 741, 743, 745, 747, 749, 751, 753, 755, 757, 759, 761, 763, 765, 767, 769, 771, 773, 775, 777, 779, 781, 783, 785, 787, 789, 791, 793, 795, 797, 799, 801, 803, 805, 807, 809, 811, 813, 815, 817, 819, 821, 823, 825, 827, 829, 831, 833, 835, 837, 839, 841, 843, 845, 847, 849, 851, 853, 855, 857, 859, 861, 863, 865 and/or 867;
c) a nucleic acid molecule comprising a nucleic acid sequence, which, as a result of the degeneracy of the genetic code, can be derived from a polypeptide sequence depicted in SEQ ID NO: 2, 4, 6, 8, 10, 12, 14, 16, 18, 20, 22, 24, 26, 28, 30, 32, 34, 36, 38, 40, 42, 44, 46, 48, 50, 52, 54, 56, 58, 60, 62, 64, 66, 68, 70, 72, 74, 76, 78, 80 and/or 82
and/or 96, 98, 100, 102, 104, 106, 108, 110, 112, 114, 116, 118, 120, 122, 124, 126, 128, 130, 132, 134, 136, 138, 140, 142, 144, 146, 148, 150, 152, 154, 156, 158, 160, 162, 164, 166, 168, 170, 172, 174, 176, 178, 180, 182, 184, 186, 188, 190, 192, 194, 196, 198, 200, 202, 204, 206, 208, 210, 212, 214, 216, 218, 220, 222, 224, 226, 228, 230, 232, 234, 236, 238, 240, 242, 244, 246, 248, 250, 252, 254, 256, 258, 260, 262, 264, 266, 268, 270, 272, 274, 276, 278, 280, 282, 284, 286, 288, 290, 292, 294, 296, 298, 300, 302, 304, 306, 308, 310, 312, 314, 316, 318, 320, 322, 324, 326, 328, 330, 332, 334, 336, 338, 340, 342, 344, 346, 348, 350, 352, 354, 356, 358, 360, 362, 364, 366, 368, 370, 372, 374, 376, 378, 380, 382, 384, 386, 388, 390, 392, 394, 396, 398, 400, 402, 404, 406, 408, 410, 412, 414, 416, 418, 420, 422, 424, 426, 428, 430, 432, 434, 436, 438, 440, 442, 444, 446, 448, 450, 452, 454, 456, 458, 460, 462, 464, 466, 468, 470, 472, 474, 476, 478, 480, 482, 484, 486, 488, 490, 492, 494, 496, 498, 500, 502, 504, 506, 508, 510, 512, 514, 516, 518, 520, 522, 524, 526, 528, 530, 532, 534, 536, 538, 540, 542, 544, 546, 548, 550, 552, 554, 556, 558, 560, 562, 564, 566, 568, 570, 572, 574, 576, 578, 580, 582, 584, 586, 588, 590, 592, 594, 596, 598, 600, 602, 604, 606, 608, 610, 612, 614, 616, 618, 620, 622, 624, 626, 628, 630, 632, 634, 636, 638, 640, 642, 644, 646, 648, 650, 652, 654, 656, 658, 660, 662, 664, 666, 668, 670, 672, 674, 676, 678, 680, 682, 684, 686, 688, 690, 692, 694, 696, 698, 700, 702, 704, 706, 708, 710, 712, 714, 716, 718, 720, 722, 724, 726, 728, 730, 732, 734, 736, 738, 740, 742, 744, 746, 748, 750, 752, 754, 756, 758, 760, 762, 764, 766, 768, 770, 772, 774, 776, 778, 780, 782, 784, 786, 788, 790, 792, 794, 796, 798, 800, 802, 804, 806, 808, 810, 812, 814, 816, 818, 820, 822, 824, 826, 828, 830, 832, 834, 836, 838, 840, 842, 844, 846, 848, 850, 852, 854, 856, 858, 860, 862, 864, 866 and/or 868;
d) a nucleic acid molecule encoding a polypeptide having at least 50% identity with the amino acid sequence of a polypeptide encoded by the nucleic acid molecule of (a) to (c) and having the biological activity represented by the protein of SEQ ID NO: 2, 4, 6, 8, 10, 12, 14, 16, 18, 20, 22, 24, 26, 28, 30, 32, 34, 36, 38, 40, 42, 44, 46, 48, 50, 52, 54, 56, 58, 60, 62, 64, 66, 68, 70, 72, 74, 76, 78, 80 and/or 82
and/or 96, 98, 100, 102, 104, 106, 108, 110, 112, 114, 116, 118, 120, 122, 124, 126, 128, 130, 132, 134, 136, 138, 140, 142, 144, 146, 148, 150, 152, 154, 156, 158, 160, 162, 164, 166, 168, 170, 172, 174, 176, 178, 180, 182, 184, 186, 188, 190, 192, 194, 196, 198, 200, 202, 204, 206, 208, 210, 212, 214, 216, 218, 220, 222, 224, 226, 228, 230, 232, 234, 236, 238, 240, 242, 244, 246, 248, 250, 252, 254, 256, 258, 260, 262, 264, 266, 268, 270, 272, 274, 276, 278, 280, 282, 284, 286, 288, 290, 292, 294, 296, 298, 300, 302, 304, 306, 308, 310, 312, 314, 316, 318, 320, 322, 324, 326, 328, 330, 332, 334, 336, 338, 340, 342, 344, 346, 348, 350, 352, 354, 356, 358, 360, 362, 364, 366, 368, 370, 372, 374, 376, 378, 380, 382, 384, 386, 388, 390, 392, 394, 396, 398, 400, 402, 404, 406, 408, 410, 412, 414, 416, 418, 420, 422, 424, 426, 428, 430, 432, 434, 436, 438, 440, 442, 444, 446, 448, 450, 452, 454, 456, 458, 460, 462, 464, 466, 468, 470, 472, 474, 476, 478, 480, 482, 484, 486, 488, 490, 492, 494, 496, 498, 500, 502, 504, 506, 508, 510, 512, 514, 516, 518, 520, 522, 524, 526, 528, 530, 532, 534, 536, 538, 540, 542, 544, 546, 548, 550, 552, 554, 556, 558, 560, 562, 564, 566, 568, 570, 572, 574, 576, 578, 580, 582, 584, 586, 588, 590, 592, 594, 596, 598, 600, 602, 604, 606, 608, 610, 612, 614, 616, 618, 620, 622, 624, 626, 628, 630, 632, 634, 636, 638, 640, 642, 644, 646, 648, 650, 652, 654, 656, 658, 660, 662, 664, 666, 668, 670, 672, 674, 676, 678, 680, 682, 684, 686, 688, 690, 692, 694, 696, 698, 700, 702, 704, 706, 708, 710, 712, 714, 716, 718, 720, 722, 724, 726, 728, 730, 732, 734, 736, 738, 740, 742, 744, 746, 748, 750, 752, 754, 756, 758, 760, 762, 764, 766, 768, 770, 772, 774, 776, 778, 780, 782, 784, 786, 788, 790, 792, 794, 796, 798, 800, 802, 804, 806, 808, 810, 812, 814, 816, 818, 820, 822, 824, 826, 828, 830, 832, 834, 836, 838, 840, 842, 844, 846, 848, 850, 852, 854, 856, 858, 860, 862, 864, 866 and/or 868;
e) a nucleic acid molecule encoding a polypeptide which is isolated with the aid of monoclonal antibodies against a polypeptide encoded by one of the nucleic acid molecules of (a) to (d) and having the biological activity represented by the protein of SEQ ID NO: 2, 4, 6, 8, 10, 12, 14, 16, 18, 20, 22, 24, 26, 28, 30, 32, 34, 36, 38, 40, 42, 44, 46, 48, 50, 52, 54, 56, 58, 60, 62, 64, 66, 68, 70, 72, 74, 76, 78, 80 and/or 82
and/or 96, 98, 100, 102, 104, 106, 108, 110, 112, 114, 116, 118, 120, 122, 124, 126, 128, 130, 132, 134, 136, 138, 140, 142, 144, 146, 148, 150, 152, 154, 156, 158, 160, 162, 164, 166, 168, 170, 172, 174, 176, 178, 180, 182, 184, 186, 188, 190, 192, 194, 196, 198, 200, 202, 204, 206, 208, 210, 212, 214, 216, 218, 220, 222, 224, 226, 228, 230, 232, 234, 236, 238, 240, 242, 244, 246, 248, 250, 252, 254, 256, 258, 260, 262, 264, 266, 268, 270, 272, 274, 276, 278, 280, 282, 284, 286, 288, 290, 292, 294, 296, 298, 300, 302, 304, 306, 308, 310, 312, 314, 316, 318, 320, 322, 324, 326, 328, 330, 332, 334, 336, 338, 340, 342, 344, 346, 348, 350, 352, 354, 356, 358, 360, 362, 364, 366, 368, 370, 372, 374, 376, 378, 380, 382, 384, 386, 388, 390, 392, 394, 396, 398, 400, 402, 404, 406, 408, 410, 412, 414, 416, 418, 420, 422, 424, 426, 428, 430, 432, 434, 436, 438, 440, 442, 444, 446, 448, 450, 452, 454, 456, 458, 460, 462, 464, 466, 468, 470, 472, 474, 476, 478, 480, 482, 484, 486, 488, 490, 492, 494, 496, 498, 500, 502, 504, 506, 508, 510, 512, 514, 516, 518, 520, 522, 524, 526, 528, 530, 532, 534, 536, 538, 540, 542, 544, 546, 548, 550, 552, 554, 556, 558, 560, 562, 564, 566, 568, 570, 572, 574, 576, 578, 580, 582, 584, 586, 588, 590, 592, 594, 596, 598, 600, 602, 604, 606, 608, 610, 612, 614, 616, 618, 620, 622, 624, 626, 628, 630, 632, 634, 636, 638, 640, 642, 644, 646, 648, 650, 652, 654, 656, 658, 660, 662, 664, 666, 668, 670, 672, 674, 676, 678, 680, 682, 684, 686, 688, 690, 692, 694, 696, 698, 700, 702, 704, 706, 708, 710, 712, 714, 716, 718, 720, 722, 724, 726, 728, 730, 732, 734, 736, 738, 740, 742, 744, 746, 748, 750, 752, 754, 756, 758, 760, 762, 764, 766, 768, 770, 772, 774, 776, 778, 780, 782, 784, 786, 788, 790, 792, 794, 796, 798, 800, 802, 804, 806, 808, 810, 812, 814, 816, 818, 820, 822, 824, 826, 828, 830, 832, 834, 836, 838, 840, 842, 844, 846, 848, 850, 852, 854, 856, 858, 860, 862, 864, 866 and/or 868;
f) a nucleic acid molecule which is obtained by screening a suitable nucleic acid library under stringent hybridisation conditions with a probe comprising one of the sequences of the nucleic acid molecule of (a) or (b) or with a fragment thereof having at least 15 nt of the nucleic acid molecule characterized in (a) to (c) and encoding a polypeptide having the biological activity represented by a protein whose reduction or deletion results in increased tolerance and/or resistance to an environmental stress
or which comprises a sequence which is complementary thereto.

3. The transformed plant cell of claim 1 with one or more nucleic acid sequences homologous to one of the sequences of SEQ ID NO: 1, 3, 5, 7, 9, 11, 13, 15, 17, 19, 21, 23, 25, 27, 29, 31, 33, 35, 37, 39, 41, 43, 45, 47, 49, 51, 53, 55, 57, 59, 61, 63, 65, 67, 69, 71, 73, 75, 77, 79 and/or 81
and/or 95, 97, 99, 101, 103, 105, 107, 109, 111, 113, 115, 117, 119, 121, 123, 125, 127, 129, 131, 133, 135, 137, 139, 141, 143, 145, 147, 149, 151, 153, 155, 157, 159, 161, 163, 165, 167, 169, 171, 173, 175, 177, 179, 181, 183, 185, 187, 189, 191, 193, 195, 197, 199, 201, 203, 205, 207, 209, 211, 213, 215, 217, 219, 221, 223, 225, 227, 229, 231, 233, 235, 237, 239, 241, 243, 245, 247, 249, 251, 253, 255, 257, 259, 261, 263, 265, 267, 269, 271, 273, 275, 277, 279, 281, 283, 285, 287, 289, 291, 293, 295, 297, 299, 301, 303, 305, 307, 309, 311, 313, 315, 317, 319, 321, 323, 325, 327, 329, 331, 333, 335, 337, 339, 341, 343, 345, 347, 349, 351, 353, 355, 357, 359, 361, 363, 365, 367, 369, 371, 373, 375, 377, 379, 381, 383, 385, 387, 389, 391, 393, 395, 397, 399, 401, 403, 405, 407, 409, 411, 413, 415, 417, 419, 421, 423, 425, 427, 429, 431, 433, 435, 437, 439, 441, 443, 445, 447, 449, 451, 453, 455, 457, 459, 461, 463, 465, 467, 469, 471, 473, 475, 477, 479, 481, 483, 485, 487, 489, 491, 493, 495, 497, 499, 501, 503, 505, 507, 509, 511, 513, 515, 517, 519, 521, 523, 525, 527, 529, 531, 533, 535, 537, 539, 541, 543, 545, 547, 549, 551, 553, 555, 557, 559, 561, 563, 565, 567, 569, 571, 573, 575, 577, 579, 581, 583, 585, 587, 589, 591, 593, 595, 597, 599, 601, 603, 605, 607, 609, 611, 613, 615, 617, 619, 621, 623, 625, 627, 629, 631, 633, 635, 637, 639, 641, 643, 645, 647, 649, 651, 653, 655, 657, 659, 661, 663, 665, 667, 669, 671, 673, 675, 677, 679, 681, 683, 685, 687, 689, 691, 693, 695, 697, 699, 701, 703, 705, 707, 709, 711, 713, 715, 717, 719, 721, 723, 725, 727, 729, 731, 733, 735, 737, 739, 741, 743, 745, 747, 749, 751, 753, 755, 757, 759, 761, 763, 765, 767, 769, 771, 773, 775, 777, 779, 781, 783, 785, 787, 789, 791, 793, 795, 797, 799, 801, 803, 805, 807, 809, 811, 813, 815, 817, 819, 821, 823, 825, 827, 829, 831, 833, 835, 837, 839, 841, 843, 845, 847, 849, 851, 853, 855, 857, 859, 861, 863, 865 and/or 867, wherein the plant is selected from the group consisting of maize, wheat, rye, oat, triticale, rice, barley, soybean, peanut, cotton, rapeseed, canola, manihot, pepper, sunflower, flax, borage, safflower, linseed, primrose, rapeseed, turnip rape, tagetes, solanaceous plants, potato, tobacco, eggplant, tomato, Vicia species, pea, alfalfa, coffee, cacao, tea, Salix species, oil palm, coconut, perennial grass, forage crops and Arabidopsis thaliana.

4. The transformed plant cell of claim 3, wherein the nucleic acid is at least 50% homologous to said sequences of SEQ ID NO: 1, 3, 5, 7, 9, 11, 13, 15, 17, 19, 21, 23, 25, 27, 29, 31, 33, 35, 37, 39, 41, 43, 45, 47, 49, 51, 53, 55, 57, 59, 61, 63, 65, 67, 69, 71, 73, 75, 77, 79 and/or 81
and/or 95, 97, 99, 101, 103, 105, 107, 109, 111, 113, 115, 117, 119, 121, 123, 125, 127, 129, 131, 133, 135, 137, 139, 141, 143, 145, 147, 149, 151, 153, 155, 157, 159, 161, 163, 165, 167, 169, 171, 173, 175, 177, 179, 181, 183, 185, 187, 189, 191, 193, 195, 197, 199, 201, 203, 205, 207, 209, 211, 213, 215, 217, 219, 221, 223, 225, 227, 229, 231, 233, 235, 237, 239, 241, 243, 245, 247, 249, 251, 253, 255, 257, 259, 261, 263, 265, 267, 269, 271, 273, 275, 277, 279, 281, 283, 285, 287, 289, 291, 293, 295, 297, 299, 301, 303, 305, 307, 309, 311, 313, 315, 317, 319, 321, 323, 325, 327, 329, 331, 333, 335, 337, 339, 341, 343, 345, 347, 349, 351, 353, 355, 357, 359, 361, 363, 365, 367, 369, 371, 373, 375, 377, 379, 381, 383, 385, 387, 389, 391, 393, 395, 397, 399, 401, 403, 405, 407, 409, 411, 413, 415, 417, 419, 421, 423, 425, 427, 429, 431, 433, 435, 437, 439, 441, 443, 445, 447, 449, 451, 453, 455, 457, 459, 461, 463, 465, 467, 469, 471, 473, 475, 477, 479, 481, 483, 485, 487, 489, 491, 493, 495, 497, 499, 501, 503, 505, 507, 509, 511, 513, 515, 517, 519, 521, 523, 525, 527, 529, 531, 533, 535, 537, 539, 541, 543, 545, 547, 549, 551, 553, 555, 557, 559, 561, 563, 565, 567, 569, 571, 573, 575, 577, 579, 581, 583, 585, 587, 589, 591, 593, 595, 597, 599, 601, 603, 605, 607, 609, 611, 613, 615, 617, 619, 621, 623, 625, 627, 629, 631, 633, 635, 637, 639, 641, 643, 645, 647, 649, 651, 653, 655, 657, 659, 661, 663, 665, 667, 669, 671, 673, 675, 677, 679, 681, 683, 685, 687, 689, 691, 693, 695, 697, 699, 701, 703, 705, 707, 709, 711, 713, 715, 717, 719, 721, 723, 725, 727, 729, 731, 733, 735, 737, 739, 741, 743, 745, 747, 749, 751, 753, 755, 757, 759, 761, 763, 765, 767, 769, 771, 773, 775, 777, 779, 781, 783, 785, 787, 789, 791, 793, 795, 797, 799, 801, 803, 805, 807, 809, 811, 813, 815, 817, 819, 821, 823, 825, 827, 829, 831, 833, 835, 837, 839, 841, 843, 845, 847, 849, 851, 853, 855, 857, 859, 861, 863, 865 and/or 867.

5. The transformed plant cell of claim 1 derived from a monocotyledonous plant.

6. The transformed plant cell of claim 1 derived from a dicotyledonous plant.

7. The transformed plant cell of claim 1, wherein the plant is selected from the group consisting of maize, wheat, rye, oat, triticale, rice, barley, soybean, peanut, cotton, rapeseed, canola, manihot, pepper, sunflower, flax, borage, safflower, linseed, primrose, rapeseed, turnip rape, tagetes, solanaceous plants, potato, tobacco, eggplant, tomato, Vicia species, pea, alfalfa, coffee, cacao, tea, Salix species, oil palm, coconut, perennial grass, forage crops and Arabidopsis thaliana.

8. The transformed plant cell of claim 1, derived from a gymnosperm plant.

9. A transformed plant generated from the plant cell according to of claim 1 and which is a monocot or dicot plant.

10. The transformed plant of claim 9, which is selected from the group consisting of maize, wheat, rye, oat, triticale, rice, barley, soybean, peanut, cotton, rapeseed, canola, manihot, pepper, sunflower, flax, borage, safflower, linseed, primrose, rapeseed, turnip rape, tagetes, solanaceous plants, potato, tobacco, eggplant, tomato, Vicia species, pea, alfalfa, coffee, cacao, tea, SaNx species, oil palm, coconut, perennial grass, forage crops and Arabidopsis thaliana.

11. A transformed plant generated from the plant cell claim 1 and which is a gymnosperm plant.

12. A seed produced by the transformed plant of claim 9, wherein the seed is at least genetically heterozygous for a gene, that when inactivated or down-regulated confers increased tolerance to environmental stress as compared to a wild type plant.

13. A method of producing a transformed plant with increased tolerance and/or resistance to environmental stress as compared to a corresponding non-transformed wild type plant by inactivation or down-regulation of a gene in the transformed plant resulting in increased tolerance and/or resistance to environmental stress as compared to a corresponding non-transformed wild type plant, comprising
(a) transforming a plant cell by inactivation or down-regulation of one or more genes encoded by one or more nucleic acids selected from a group consisting of sequences of SEQ ID NO: 1, 3, 5, 7, 9, 11, 13, 15, 17, 19, 21, 23, 25, 27, 29, 31, 33, 35, 37, 39, 41, 43, 45, 47, 49, 51, 53, 55, 57, 59, 61, 63, 65, 67, 69, 71, 73, 75, 77, 79 and/or 81
and/or 95, 97, 99, 101, 103, 105, 107, 109, 111, 113, 115, 117, 119, 121, 123, 125, 127, 129, 131, 133, 135, 137, 139, 141, 143, 145, 147, 149, 151, 153, 155, 157, 159, 161, 163, 165, 167, 169, 171, 173, 175, 177, 179, 181, 183, 185, 187, 189, 191, 193, 195, 197, 199, 201, 203, 205, 207, 209, 211, 213, 215, 217, 219, 221, 223, 225, 227, 229, 231, 233, 235, 237, 239, 241, 243, 245, 247, 249, 251, 253, 255, 257, 259, 261, 263, 265, 267, 269, 271, 273, 275, 277, 279, 281, 283, 285, 287, 289, 291, 293, 295, 297, 299, 301, 303, 305, 307, 309, 311, 313, 315, 317, 319, 321, 323, 325, 327, 329, 331, 333, 335, 337, 339, 341, 343, 345, 347, 349, 351, 353, 355, 357, 359, 361, 363, 365, 367, 369, 371, 373, 375, 377, 379, 381, 383, 385, 387, 389, 391, 393, 395, 397, 399, 401, 403, 405, 407, 409, 411, 413, 415, 417, 419, 421, 423, 425, 427, 429, 431, 433, 435, 437, 439, 441, 443, 445, 447, 449, 451, 453, 455, 457, 459, 461, 463, 465, 467, 469, 471, 473, 475, 477, 479, 481, 483, 485, 487, 489, 491, 493, 495, 497, 499, 501, 503, 505, 507, 509, 511, 513, 515, 517, 519, 521, 523, 525, 527, 529, 531, 533, 535, 537, 539, 541, 543, 545, 547, 549, 551, 553, 555, 557, 559, 561, 563, 565, 567, 569, 571, 573, 575, 577, 579, 581, 583, 585, 587, 589, 591, 593, 595, 597, 599, 601, 603, 605, 607, 609, 611, 613, 615, 617, 619, 621, 623, 625, 627, 629, 631, 633, 635, 637, 639, 641, 643, 645, 647, 649, 651, 653, 655, 657, 659, 661, 663, 665, 667, 669, 671, 673, 675, 677, 679, 681, 683, 685, 687, 689, 691, 693, 695, 697, 699, 701, 703, 705, 707, 709, 711, 713, 715, 717, 719, 721, 723, 725, 727, 729, 731, 733, 735, 737, 739, 741, 743, 745, 747, 749, 751, 753, 755, 757, 759, 761, 763, 765, 767, 769, 771, 773, 775, 777, 779, 781, 783, 785, 787, 789, 791, 793, 795, 797, 799, 801, 803, 805, 807, 809, 811, 813, 815, 817, 819, 821, 823, 825, 827, 829, 831, 833, 835, 837, 839, 841, 843, 845, 847, 849, 851, 853, 855, 857, 859, 861, 863, 865 and/or 867 and/or homologs thereof and
(b) generating from the plant cell a transformed plant with an increased tolerance and/or resistance to environmental stress as compared to a corresponding wild type plant.

14. A method of inducing increased tolerance and/or resistance to environmental stress as compared to a corresponding non-transformed wild type plant in plant cell of claim 1 or a plant generated from said plant cell by inactivation or down-regulation of one or more genes encoded by one or more nucleic acids selected from a group consisting of sequences of SEQ ID NO: 1, 3, 5, 7, 9, 11, 13, 15, 17, 19, 21, 23, 25, 27, 29, 31, 33, 35, 37, 39, 41, 43, 45, 47, 49, 51, 53, 55, 57, 59, 61, 63, 65, 67, 69, 71, 73, 75, 77, 79 and/or 81
and/or 95, 97, 99, 101, 103, 105, 107, 109, 111, 113, 115, 117, 119, 121, 123, 125, 127, 129, 131, 133, 135, 137, 139, 141, 143, 145, 147, 149, 151, 153, 155, 157, 159, 161, 163, 165, 167, 169, 171, 173, 175, 177, 179, 181, 183, 185, 187, 189, 191, 193, 195, 197, 199, 201, 203, 205, 207, 209, 211, 213, 215, 217, 219, 221, 223, 225, 227, 229, 231, 233, 235, 237, 239, 241, 243, 245, 247, 249, 251, 253, 255, 257, 259, 261, 263, 265, 267, 269, 271, 273, 275, 277, 279, 281, 283, 285, 287, 289, 291, 293, 295, 297, 299, 301, 303, 305, 307, 309, 311, 313, 315, 317, 319, 321, 323, 325, 327, 329, 331, 333, 335, 337, 339, 341, 343, 345, 347, 349, 351, 353, 355, 357, 359, 361, 363, 365, 367, 369, 371, 373, 375, 377, 379, 381, 383, 385, 387, 389, 391, 393, 395, 397, 399, 401, 403, 405, 407, 409, 411, 413, 415, 417, 419, 421, 423, 425, 427, 429, 431, 433, 435, 437, 439, 441, 443, 445, 447, 449, 451, 453, 455, 457, 459, 461, 463, 465, 467, 469, 471, 473, 475, 477, 479, 481, 483, 485, 487, 489, 491, 493, 495, 497, 499, 501, 503, 505, 507, 509, 511, 513, 515, 517, 519, 521, 523, 525, 527, 529, 531, 533, 535, 537, 539, 541, 543, 545, 547, 549, 551, 553, 555, 557, 559, 561, 563, 565, 567, 569, 571, 573, 575, 577, 579, 581, 583, 585, 587, 589, 591, 593, 595, 597, 599, 601, 603, 605, 607, 609, 611, 613, 615, 617, 619, 621, 623, 625, 627, 629, 631, 633, 635, 637, 639, 641, 643, 645, 647, 649, 651, 653, 655, 657, 659, 661, 663, 665, 667, 669, 671, 673, 675, 677, 679, 681, 683, 685, 687, 689, 691, 693, 695, 697, 699, 701, 703, 705, 707, 709, 711, 713, 715, 717, 719, 721, 723, 725, 727, 729, 731, 733, 735, 737, 739, 741, 743, 745, 747, 749, 751, 753, 755, 757, 759, 761, 763, 765, 767, 769, 771, 773, 775, 777, 779, 781, 783, 785, 787, 789, 791, 793, 795, 797, 799, 801, 803, 805, 807, 809, 811, 813, 815, 817, 819, 821, 823, 825, 827, 829, 831, 833, 835, 837, 839, 841, 843, 845, 847, 849, 851, 853, 855, 857, 859, 861, 863, 865 and/or 867 and/or homologs thereof.

15. The method of claim 14, wherein the gene encoding nucleic acid is at least 50% homologous to sequences of SEQ ID NO: 1, 3, 5, 7, 9, 11, 13, 15, 17, 19, 21, 23, 25, 27, 29, 31, 33, 35, 37, 39, 41, 43, 45, 47, 49, 51, 53, 55, 57, 59, 61, 63, 65, 67, 69, 71, 73, 75, 77, 79 and/or 81
and/or 95, 97, 99, 101, 103, 105, 107, 109, 111, 113, 115, 117, 119, 121, 123, 125, 127, 129, 131, 133, 135, 137, 139, 141, 143, 145, 147, 149, 151, 153, 155, 157, 159, 161, 163, 165, 167, 169, 171, 173, 175, 177, 179, 181, 183, 185, 187, 189, 191, 193, 195, 197, 199, 201, 203, 205, 207, 209, 211, 213, 215, 217, 219, 221, 223, 225, 227, 229, 231, 233, 235, 237, 239, 241, 243, 245, 247, 249, 251, 253, 255, 257, 259, 261, 263, 265, 267, 269, 271, 273, 275, 277, 279, 281, 283, 285, 287, 289, 291, 293, 295, 297, 299, 301, 303, 305, 307, 309, 311, 313, 315, 317, 319, 321, 323, 325, 327, 329, 331, 333, 335, 337, 339, 341, 343, 345, 347, 349, 351, 353, 355, 357, 359, 361, 363, 365, 367, 369, 371, 373, 375, 377, 379, 381, 383, 385, 387, 389, 391, 393, 395, 397, 399, 401, 403, 405, 407, 409, 411, 413, 415, 417, 419, 421, 423, 425, 427, 429, 431, 433, 435, 437, 439, 441, 443, 445, 447, 449, 451, 453, 455, 457, 459, 461, 463, 465, 467, 469, 471, 473, 475, 477, 479, 481, 483, 485, 487, 489, 491, 493, 495, 497, 499, 501, 503, 505, 507, 509, 511, 513, 515, 517, 519, 521, 523, 525, 527, 529, 531, 533, 535, 537, 539, 541, 543, 545, 547, 549, 551, 553, 555, 557, 559, 561, 563, 565, 567, 569, 571, 573, 575, 577, 579, 581, 583, 585, 587, 589, 591, 593, 595, 597, 599, 601, 603, 605, 607, 609, 611, 613, 615, 617, 619, 621, 623, 625, 627, 629, 631, 633, 635, 637, 639, 641, 643, 645, 647, 649, 651, 653, 655, 657, 659, 661, 663, 665, 667, 669, 671, 673, 675, 677, 679, 681, 683, 685, 687, 689, 691, 693, 695, 697, 699, 701, 703, 705, 707, 709, 711, 713, 715, 717, 719, 721, 723, 725, 727, 729, 731, 733, 735, 737, 739, 741, 743, 745, 747, 749, 751, 753, 755, 757, 759, 761, 763, 765, 767, 769, 771, 773, 775, 777, 779, 781, 783, 785, 787, 789, 791, 793, 795, 797, 799, 801, 803, 805, 807, 809, 811, 813, 815, 817, 819, 821, 823, 825, 827, 829, 831, 833, 835, 837, 839, 841, 843, 845, 847, 849, 851, 853, 855, 857, 859, 861, 863, 865 and/or 867.

16. A plant expression cassette comprising a nucleic acid construct, which when expressed allows inactivation or down-regulation of one or more genes encoded by one or more nucleic acids selected from the group consisting of sequences of SEQ ID NO: 1, 3, 5, 7, 9, 11, 13, 15, 17, 19, 21, 23, 25, 27, 29, 31, 33, 35, 37, 39, 41, 43, 45, 47, 49, 51, 53, 55, 57, 59, 61, 63, 65, 67, 69, 71, 73, 75, 77, 79 and/or 81; and/or
95, 97, 99, 101, 103, 105, 107, 109, 111, 113, 115, 117, 119, 121, 123, 125, 127, 129, 131, 133, 135, 137, 139, 141, 143, 145, 147, 149, 151, 153, 155, 157, 159, 161, 163, 165, 167, 169, 171, 173, 175, 177, 179, 181, 183, 185, 187, 189, 191, 193, 195, 197, 199, 201, 203, 205, 207, 209, 211, 213, 215, 217, 219, 221, 223, 225, 227, 229, 231, 233, 235, 237, 239, 241, 243, 245, 247, 249, 251, 253, 255, 257, 259, 261, 263, 265, 267, 269, 271, 273, 275, 277, 279, 281, 283, 285, 287, 289, 291, 293, 295, 297, 299, 301, 303, 305, 307, 309, 311, 313, 315, 317, 319, 321, 323, 325, 327, 329, 331, 333, 335, 337, 339, 341, 343, 345, 347, 349, 351, 353, 355, 357, 359, 361, 363, 365, 367, 369, 371, 373, 375, 377, 379, 381, 383, 385, 387, 389, 391, 393, 395, 397, 399, 401, 403, 405, 407, 409, 411, 413, 415, 417, 419, 421, 423, 425, 427, 429, 431, 433, 435, 437, 439, 441, 443, 445, 447, 449, 451, 453, 455, 457, 459, 461, 463, 465, 467, 469, 471, 473, 475, 477, 479, 481, 483, 485, 487, 489, 491, 493, 495, 497, 499, 501, 503, 505, 507, 509, 511, 513, 515, 517, 519, 521, 523, 525, 527, 529, 531, 533, 535, 537, 539, 541, 543, 545, 547, 549, 551, 553, 555, 557, 559, 561, 563, 565, 567, 569, 571, 573, 575, 577, 579, 581, 583, 585, 587, 589, 591, 593, 595, 597, 599, 601, 603, 605, 607, 609, 611, 613, 615, 617, 619, 621, 623, 625, 627, 629, 631, 633, 635, 637, 639, 641, 643, 645, 647, 649, 651, 653, 655, 657, 659, 661, 663, 665, 667, 669, 671, 673, 675, 677, 679, 681, 683, 685, 687, 689, 691, 693, 695, 697, 699, 701, 703, 705, 707, 709, 711, 713, 715, 717, 719, 721, 723, 725, 727, 729, 731, 733, 735, 737, 739, 741, 743, 745, 747, 749, 751, 753, 755, 757, 759, 761, 763, 765, 767, 769, 771, 773, 775, 777, 779, 781, 783, 785, 787, 789, 791, 793, 795, 797, 799, 801, 803, 805, 807, 809, 811, 813, 815, 817, 819, 821, 823, 825, 827, 829, 831, 833, 835, 837, 839, 841, 843, 845, 847, 849, 851, 853, 855, 857, 859, 861, 863, 865 and/or 867 and/or homologs thereof and/or parts thereof by the method of claim 13.

17. A method of detecting environmental stress in plant cells or plants comprising screening the plant cells for increased tolerance and/or resistance to environmental stress as compared to non-stress conditions.

18. A method of screening plant cells or plants for increased tolerance and/or resistance to environmental stress comprising screening the plant cells under stress conditions for increased tolerance and/or resistance to environmental stress as compared to non-stress conditions.

19. A method of breeding plant cells or plants towards increased tolerance and/or resistance to environmental stress comprising screening the plant cells under stress conditions for increased tolerance and/or resistance to environmental stress as compared to non-stress conditions and selecting those with increased tolerance and/or resistance to environmental stress.

20. The method of claim 14, wherein the increased tolerance and/or resistance to environmental stress is due to one or more inactivated or down-regulated genes.

21. The method of claim 19, wherein tolerance and/or resistance to environmental stress is increased by one or more inactivated or down-regulated genes encoded by one or more nucleic acid sequences selected from the group consisting of sequences of nucleic acids shown in SEQ ID NO: 1, 3, 5, 7, 9, 11, 13, 15, 17, 19, 21, 23, 25, 27, 29, 31, 33, 35, 37, 39, 41, 43, 45, 47, 49, 51, 53, 55, 57, 59, 61, 63, 65, 67, 69, 71, 73, 75, 77, 79 and/or 81
and/or 95, 97, 99, 101, 103, 105, 107, 109, 111, 113, 115, 117, 119, 121, 123, 125, 127, 129, 131, 133, 135, 137, 139, 141, 143, 145, 147, 149, 151, 153, 155, 157, 159, 161, 163, 165, 167, 169, 171, 173, 175, 177, 179, 181, 183, 185, 187, 189, 191, 193, 195, 197, 199, 201, 203, 205, 207, 209, 211, 213, 215, 217, 219, 221, 223, 225, 227, 229, 231, 233, 235, 237, 239, 241, 243, 245, 247, 249, 251, 253, 255, 257, 259, 261, 263, 265, 267, 269, 271, 273, 275, 277, 279, 281, 283, 285, 287, 289, 291, 293, 295, 297, 299, 301, 303, 305, 307, 309, 311, 313, 315, 317, 319, 321, 323, 325, 327, 329, 331, 333, 335, 337, 339, 341, 343, 345, 347, 349, 351, 353, 355, 357, 359, 361, 363, 365, 367, 369, 371, 373, 375, 377, 379, 381, 383, 385, 387, 389, 391, 393, 395, 397, 399, 401, 403, 405, 407, 409, 411, 413, 415, 417, 419, 421, 423, 425, 427, 429, 431, 433, 435, 437, 439, 441, 443, 445, 447, 449, 451, 453, 455, 457, 459, 461, 463, 465, 467, 469, 471, 473, 475, 477, 479, 481, 483, 485, 487, 489, 491, 493, 495, 497, 499, 501, 503, 505, 507, 509, 511, 513, 515, 517, 519, 521, 523, 525, 527, 529, 531, 533, 535, 537, 539, 541, 543, 545, 547, 549, 551, 553, 555, 557, 559, 561, 563, 565, 567, 569, 571, 573, 575, 577, 579, 581, 583, 585, 587, 589, 591, 593, 595, 597, 599, 601, 603, 605, 607, 609, 611, 613, 615, 617, 619, 621, 623, 625, 627, 629, 631, 633, 635, 637, 639, 641, 643, 645, 647, 649, 651, 653, 655, 657, 659, 661, 663, 665, 667, 669, 671, 673, 675, 677, 679, 681, 683, 685, 687, 689, 691, 693, 695, 697, 699, 701, 703, 705, 707, 709, 711, 713, 715, 717, 719, 721, 723, 725, 727, 729, 731, 733, 735, 737, 739, 741, 743, 745, 747, 749, 751, 753, 755, 757, 759, 761, 763, 765, 767, 769, 771, 773, 775, 777, 779, 781, 783, 785, 787, 789, 791, 793, 795, 797, 799, 801, 803, 805, 807, 809, 811, 813, 815, 817, 819, 821, 823, 825, 827, 829, 831, 833, 835, 837, 839, 841, 843, 845, 847, 849, 851, 853, 855, 857, 859, 861, 863, 865 and/or 867 and/or homologs thereof.

22. A transformed plant cell with an inactivated or down-regulated gene encoded by a nucleic acid sequence selected from the group consisting of sequences of SEQ ID NO: 1, 3, 5, 7, 9, 11, 13, 15, 17, 19, 21, 23, 25, 27, 29, 31, 33, 35, 37, 39, 41, 43, 45, 47, 49, 51, 53, 55, 57, 59, 61, 63, 65, 67, 69, 71, 73, 75, 77, 79 and/or 81
and/or 95, 97, 99, 101, 103, 105, 107, 109, 111, 113, 115, 117, 119, 121, 123, 125, 127, 129, 131, 133, 135, 137, 139, 141, 143, 145, 147, 149, 151, 153, 155, 157, 159, 161, 163, 165, 167, 169, 171, 173, 175, 177, 179, 181, 183, 185, 187, 189, 191, 193, 195, 197, 199, 201, 203, 205, 207, 209, 211, 213, 215, 217, 219, 221, 223, 225, 227, 229, 231, 233, 235, 237, 239, 241, 243, 245, 247, 249, 251, 253, 255, 257, 259, 261, 263, 265, 267, 269, 271, 273, 275, 277, 279, 281, 283, 285, 287, 289, 291, 293, 295, 297, 299, 301, 303, 305, 307, 309, 311, 313, 315, 317, 319, 321, 323, 325, 327, 329, 331, 333, 335, 337, 339, 341, 343, 345, 347, 349, 351, 353, 355, 357, 359, 361, 363, 365, 367, 369, 371, 373, 375, 377, 379, 381, 383, 385, 387, 389, 391, 393, 395, 397, 399, 401, 403, 405, 407, 409, 411, 413, 415, 417, 419, 421, 423, 425, 427, 429, 431, 433, 435, 437, 439, 441, 443, 445, 447, 449, 451, 453, 455, 457, 459, 461, 463, 465, 467, 469, 471, 473, 475, 477, 479, 481, 483, 485, 487, 489, 491, 493, 495, 497, 499, 501, 503, 505, 507, 509, 511, 513, 515, 517, 519, 521, 523, 525, 527, 529, 531, 533, 535, 537, 539, 541, 543, 545, 547, 549, 551, 553, 555, 557, 559, 561, 563, 565, 567, 569, 571, 573, 575, 577, 579, 581, 583, 585, 587, 589, 591, 593, 595, 597, 599, 601, 603, 605, 607, 609, 611, 613, 615, 617, 619, 621, 623, 625, 627, 629, 631, 633, 635, 637, 639, 641, 643, 645, 647, 649, 651, 653, 655, 657, 659, 661, 663, 665, 667, 669, 671, 673, 675, 677, 679, 681, 683, 685, 687, 689, 691, 693, 695, 697, 699, 701, 703, 705, 707, 709, 711, 713, 715, 717, 719, 721, 723, 725, 727, 729, 731, 733, 735, 737, 739, 741, 743, 745, 747, 749, 751, 753, 755, 757, 759, 761, 763, 765, 767, 769, 771, 773, 775, 777, 779, 781, 783, 785, 787, 789, 791, 793, 795, 797, 799, 801, 803, 805, 807, 809, 811, 813, 815, 817, 819, 821, 823, 825, 827, 829, 831, 833, 835, 837, 839, 841, 843, 845, 847, 849, 851, 853, 855, 857, 859, 861, 863, 865 and/or 867 and/or homologs thereof.

23. An isolated nucleic acid molecule which comprises a nucleic acid molecule selected from the group consisting of:
a) a nucleic acid molecule which encodes a polypeptide comprising the polypeptide according to SEQ ID NO: 2, 4, 6, 8, 10, 12, 14, 16, 18, 20, 22, 24, 26, 28, 30, 32, 34, 36, 38, 40, 42, 44, 46, 48, 50, 52, 54, 56, 58, 60, 62, 64, 66, 68, 70, 72, 74, 76, 78, 80 and/or
and/or 96, 98, 100, 102, 104, 106, 108, 110, 112, 114, 116, 118, 120, 122, 124, 126, 128, 130, 132, 134, 136, 138, 140, 142, 144, 146, 148, 150, 152, 154, 156, 158, 160, 162, 164, 166, 168, 170, 172, 174, 176, 178, 180, 182, 184, 186, 188, 190, 192, 194, 196, 198, 200, 202, 204, 206, 208, 210, 212, 214, 216, 218, 220, 222, 224, 226, 228, 230, 232, 234, 236, 238, 240, 242, 244, 246, 248, 250, 252, 254, 256, 258, 260, 262, 264, 266, 268, 270, 272, 274, 276, 278, 280, 282, 284, 286, 288, 290, 292, 294, 296, 298, 300, 302, 304, 306, 308, 310, 312, 314, 316, 318, 320, 322, 324, 326, 328, 330, 332, 334, 336, 338, 340, 342, 344, 346, 348, 350, 352, 354, 356, 358, 360, 362, 364, 366, 368, 370, 372, 374, 376, 378, 380, 382, 384, 386, 388, 390, 392, 394, 396, 398, 400, 402, 404, 406, 408, 410, 412, 414, 416, 418, 420, 422, 424, 426, 428, 430, 432, 434, 436, 438, 440, 442, 444, 446, 448, 450, 452, 454, 456, 458, 460, 462, 464, 466, 468, 470, 472, 474, 476, 478, 480, 482, 484, 486, 488, 490, 492, 494, 496, 498, 500, 502, 504, 506, 508, 510, 512, 514, 516, 518, 520, 522, 524, 526, 528, 530, 532, 534, 536, 538, 540, 542, 544, 546, 548, 550, 552, 554, 556, 558, 560, 562, 564, 566, 568, 570, 572, 574, 576, 578, 580, 582, 584, 586, 588, 590, 592, 594, 596, 598, 600, 602, 604, 606, 608, 610, 612, 614, 616, 618, 620, 622, 624, 626, 628, 630, 632, 634, 636, 638, 640, 642, 644, 646, 648, 650, 652, 654, 656, 658, 660, 662, 664, 666, 668, 670, 672, 674, 676, 678, 680, 682, 684, 686, 688, 690, 692, 694, 696, 698, 700, 702, 704, 706, 708, 710, 712, 714, 716, 718, 720, 722, 724, 726, 728, 730, 732, 734, 736, 738, 740, 742, 744, 746, 748, 750, 752, 754, 756, 758, 760, 762, 764, 766, 768, 770, 772, 774, 776, 778, 780, 782, 784, 786, 788, 790, 792, 794, 796, 798, 800, 802, 804, 806, 808, 810, 812, 814, 816, 818, 820, 822, 824, 826, 828, 830, 832, 834, 836, 838, 840, 842, 844, 846, 848, 850, 852, 854, 856, 858, 860, 862, 864, 866 and/or 868;
b) a nucleic acid molecule comprising the polynucleotide shown in SEQ ID NO: 1, 3, 5, 7, 9, 11, 13, 15, 17, 19, 21, 23, 25, 27, 29, 31, 33, 35, 37, 39, 41, 43, 45, 47, 49, 51, 53, 55, 57, 59, 61, 63, 65, 67, 69, 71, 73, 75, 77, 79 and/or 81
and/or 95, 97, 99, 101, 103, 105, 107, 109, 111, 113, 115, 117, 119, 121, 123, 125, 127, 129, 131, 133, 135, 137, 139, 141, 143, 145, 147, 149, 151, 153, 155, 157, 159, 161, 163, 165, 167, 169, 171, 173, 175, 177, 179, 181, 183, 185, 187, 189, 191, 193, 195, 197, 199, 201, 203, 205, 207, 209, 211, 213, 215, 217, 219, 221, 223, 225, 227, 229, 231, 233, 235, 237, 239, 241, 243, 245, 247, 249, 251, 253, 255, 257, 259, 261, 263, 265, 267, 269, 271, 273, 275, 277, 279, 281, 283, 285, 287, 289, 291, 293, 295, 297, 299, 301, 303, 305, 307, 309, 311, 313, 315, 317, 319, 321, 323, 325, 327, 329, 331, 333, 335, 337, 339, 341, 343, 345, 347, 349, 351, 353, 355, 357, 359, 361, 363, 365, 367, 369, 371, 373, 375, 377, 379, 381, 383, 385, 387, 389, 391, 393, 395, 397, 399, 401, 403, 405, 407, 409, 411, 413, 415, 417, 419, 421, 423, 425, 427, 429, 431, 433, 435, 437, 439, 441, 443, 445, 447, 449, 451, 453, 455, 457, 459, 461, 463, 465, 467, 469, 471, 473, 475, 477, 479, 481, 483, 485, 487, 489, 491, 493, 495, 497, 499, 501, 503, 505, 507, 509, 511, 513, 515, 517, 519, 521, 523, 525, 527, 529, 531, 533, 535, 537, 539, 541, 543, 545, 547, 549, 551, 553, 555, 557, 559, 561, 563, 565, 567, 569, 571, 573, 575, 577, 579, 581, 583, 585, 587, 589, 591, 593, 595, 597, 599, 601, 603, 605, 607, 609, 611, 613, 615, 617, 619, 621, 623, 625, 627, 629, 631, 633, 635, 637, 639, 641, 643, 645, 647, 649, 651, 653, 655, 657, 659, 661, 663, 665, 667, 669, 671, 673, 675, 677, 679, 681, 683, 685, 687, 689, 691, 693, 695, 697, 699, 701, 703, 705, 707, 709, 711, 713, 715, 717, 719, 721, 723, 725, 727, 729, 731, 733, 735, 737, 739, 741, 743, 745, 747, 749, 751, 753, 755, 757, 759, 761, 763, 765, 767, 769, 771, 773, 775, 777, 779, 781, 783, 785, 787, 789, 791, 793, 795, 797, 799, 801, 803, 805, 807, 809, 811, 813, 815, 817, 819, 821, 823, 825, 827, 829, 831, 833, 835, 837, 839, 841, 843, 845, 847, 849, 851, 853, 855, 857, 859, 861, 863, 865 and/or 867;
c) a nucleic acid molecule comprising a nucleic acid sequence, which, as a result of the degeneracy of the genetic code, can be derived from a polypeptide sequence depicted in (b) and having the biological activity represented by a protein according to SEQ ID NO: 2, 4, 6, 8, 10, 12, 14, 16, 18, 20, 22, 24, 26, 28, 30, 32, 34, 36, 38, 40, 42, 44, 46, 48, 50, 52, 54, 56, 58, 60, 62, 64, 66, 68, 70, 72, 74, 76, 78, 80 and/or 82
and/or 96, 98, 100, 102, 104, 106, 108, 110, 112, 114, 116, 118, 120, 122, 124, 126, 128, 130, 132, 134, 136, 138, 140, 142, 144, 146, 148, 150, 152, 154, 156, 158, 160, 162, 164, 166, 168, 170, 172, 174, 176, 178, 180, 182, 184, 186, 188, 190, 192, 194, 196, 198, 200, 202, 204, 206, 208, 210, 212, 214, 216, 218, 220, 222, 224, 226, 228, 230, 232, 234, 236, 238, 240, 242, 244, 246, 248, 250, 252, 254, 256, 258, 260, 262, 264, 266, 268, 270, 272, 274, 276, 278, 280, 282, 284, 286, 288, 290, 292, 294, 296, 298, 300, 302, 304, 306, 308, 310, 312, 314, 316, 318, 320, 322, 324, 326, 328, 330, 332, 334, 336, 338, 340, 342, 344, 346, 348, 350, 352, 354, 356, 358, 360, 362, 364, 366, 368, 370, 372, 374, 376, 378, 380, 382, 384, 386, 388, 390, 392, 394, 396, 398, 400, 402, 404, 406, 408, 410, 412, 414, 416, 418, 420, 422, 424, 426, 428, 430, 432, 434, 436, 438, 440, 442, 444, 446, 448, 450, 452, 454, 456, 458, 460, 462, 464, 466, 468, 470, 472, 474, 476, 478, 480, 482, 484, 486, 488, 490, 492, 494, 496, 498, 500, 502, 504, 506, 508, 510, 512, 514, 516, 518, 520, 522, 524, 526, 528, 530, 532, 534, 536, 538, 540, 542, 544, 546, 548, 550, 552, 554, 556, 558, 560, 562, 564, 566, 568, 570, 572, 574, 576, 578, 580, 582, 584, 586, 588, 590, 592, 594, 596, 598, 600, 602, 604, 606, 608, 610, 612, 614, 616, 618, 620, 622, 624, 626, 628, 630, 632, 634, 636, 638, 640, 642, 644, 646, 648, 650, 652, 654, 656, 658, 660, 662, 664.666, 668, 670, 672, 674, 676, 678, 680, 682, 684, 686, 688, 690, 692, 694, 696, 698, 700, 702, 704, 706, 708, 710, 712, 714, 716, 718, 720, 722, 724, 726, 728, 730, 732, 734, 736, 738, 740, 742, 744, 746, 748, 750, 752, 754, 756, 758, 760, 762, 764, 766, 768, 770, 772, 774, 776, 778, 780, 782, 784, 786, 788, 790, 792, 794, 796, 798, 800, 802, 804, 806, 808, 810, 812, 814, 816, 818, 820, 822, 824, 826, 828, 830, 832, 834, 836, 838, 840, 842, 844, 846, 848, 850, 852, 854, 856, 858, 860, 862, 864, 866 and/or 868;
d) a nucleic acid molecule encoding a polypeptide having at least 50% identity with the amino acid sequence of the polypeptide encoded by the nucleic acid molecule of (a) or (c) and having a biological activity represented by a protein according to SEQ ID NO: 2, 4, 6, 8, 10, 12, 14, 16, 18, 20, 22, 24, 26, 28, 30, 32, 34, 36, 38, 40, 42, 44, 46, 48, 50, 52, 54, 56, 58, 60, 62, 64, 66, 68, 70, 72, 74, 76, 78, 80 and/or 82
and/or 96, 98, 100, 102, 104, 106, 108, 110, 112, 114, 116, 118, 120, 122, 124, 126, 128, 130, 132, 134, 136, 138, 140, 142, 144, 146, 148, 150, 152, 154, 156, 158, 160, 162, 164, 166, 168, 170, 172, 174, 176, 178, 180, 182, 184, 186, 188, 190, 192, 194, 196, 198, 200, 202, 204, 206, 208, 210, 212, 214, 216, 218, 220, 222, 224, 226, 228, 230, 232, 234, 236, 238, 240, 242, 244, 246, 248, 250, 252, 254, 256, 258, 260, 262, 264, 266, 268, 270, 272, 274, 276, 278, 280, 282, 284, 286, 288, 290, 292, 294, 296, 298, 300, 302, 304, 306, 308, 310, 312, 314, 316, 318, 320, 322, 324, 326, 328, 330, 332, 334, 336, 338, 340, 342, 344, 346, 348, 350, 352, 354, 356, 358, 360, 362, 364, 366, 368, 370, 372, 374, 376, 378, 380, 382, 384, 386, 388, 390, 392, 394, 396, 398, 400, 402, 404, 406, 408, 410, 412, 414, 416, 418, 420, 422, 424, 426, 428, 430, 432, 434, 436, 438, 440, 442, 444, 446, 448, 450, 452, 454, 456, 458, 460, 462, 464, 466, 468, 470, 472, 474, 476, 478, 480, 482, 484, 486, 488, 490, 492, 494, 496, 498, 500, 502, 504, 506, 508, 510, 512, 514, 516, 518, 520, 522, 524, 526, 528, 530, 532, 534, 536, 538, 540, 542, 544, 546, 548, 550, 552, 554, 556, 558, 560, 562, 564, 566, 568, 570, 572, 574, 576, 578, 580, 582, 584, 586, 588, 590, 592, 594, 596, 598, 600, 602, 604, 606, 608, 610, 612, 614, 616, 618, 620, 622, 624, 626, 628, 630, 632, 634, 636, 638, 640, 642, 644, 646, 648, 650, 652, 654, 656, 658, 660, 662, 664, 666, 668, 670, 672, 674, 676, 678, 680, 682, 684, 686, 688, 690, 692, 694, 696, 698, 700, 702, 704, 706, 708, 710, 712, 714, 716, 718, 720, 722, 724, 726, 728, 730, 732, 734, 736, 738, 740, 742, 744, 746, 748, 750, 752, 754, 756, 758, 760, 762, 764, 766, 768, 770, 772, 774, 776, 778, 780, 782, 784, 786, 788, 790, 792, 794, 796, 798, 800, 802, 804, 806, 808, 810, 812, 814, 816, 818, 820, 822, 824, 826, 828, 830, 832, 834, 836, 838, 840, 842, 844, 846, 848, 850, 852, 854, 856, 858, 860, 862, 864, 866 and/or 868;
e) a nucleic acid molecule encoding a polypeptide, which is isolated with the aid of monoclonal antibodies against a polypeptide encoded by one of the nucleic acid molecules of (a) to (c) and having a biological activity represented by protein X;
f) a nucleic acid molecule which is obtainable by screening a suitable library under stringent hybridization conditions with a probe comprising one of the sequences of the nucleic acid molecule of (a) to (c) or with a fragment of at least 15 nt, of the nucleic acid molecule characterized in (a) to (i) and encoding a polypeptide having the biological activity represented by protein X;
g) a nucleic acid molecule having at least 70% sequence identity to a polynucleotide selected from the group consisting of the polynucleotides shown in SEQ ID NO 1, 3, 5, 7, 9, 11, 13, 15, 17, 19, 21, 23, 25, 27, 29, 31, 33, 35, 37, 39, 41, 43, 45, 47, 49, 51, 53, 55, 57, 59, 61, 63, 65, 67, 69, 71, 73, 75, 77, 79 and/or 81
and/or 95, 97, 99, 101, 103, 105, 107, 109, 111, 113, 115, 117, 119, 121, 123, 125, 127, 129, 131, 133, 135, 137, 139, 141, 143, 145, 147, 149, 151, 153, 155, 157, 159, 161, 163, 165, 167, 169, 171, 173, 175, 177, 179, 181, 183, 185, 187, 189, 191, 193, 195, 197, 199, 201, 203, 205, 207, 209, 211, 213, 215, 217, 219, 221, 223, 225, 227, 229, 231, 233, 235, 237, 239, 241, 243, 245, 247, 249, 251, 253, 255, 257, 259, 261, 263, 265, 267, 269, 271, 273, 275, 277, 279, 281, 283, 285, 287, 289, 291, 293, 295, 297, 299, 301, 303, 305, 307, 309, 311, 313, 315, 317, 319, 321, 323, 325, 327, 329, 331, 333, 335, 337, 339, 341, 343, 345, 347, 349, 351, 353, 355, 357, 359, 361, 363, 365, 367, 369, 371, 373, 375, 377, 379, 381, 383, 385, 387, 389, 391, 393, 395, 397, 399, 401, 403, 405, 407, 409, 411, 413, 415, 417, 419, 421, 423, 425, 427, 429, 431, 433, 435, 437, 439, 441, 443, 445, 447, 449, 451, 453, 455, 457, 459, 461, 463, 465, 467, 469, 471, 473, 475, 477, 479, 481, 483, 485, 487, 489, 491, 493, 495, 497, 499, 501, 503, 505, 507, 509, 511, 513, 515, 517, 519, 521, 523, 525, 527, 529, 531, 533, 535, 537, 539, 541, 543, 545, 547, 549, 551, 553, 555, 557, 559, 561, 563, 565, 567, 569, 571, 573, 575, 577, 579, 581, 583, 585, 587, 589, 591, 593, 595, 597, 599, 601, 603, 605, 607, 609, 611, 613, 615, 617, 619, 621, 623, 625, 627, 629, 631, 633, 635, 637, 639, 641, 643, 645, 647, 649, 651, 653, 655, 657, 659, 661, 663, 665, 667, 669, 671, 673, 675, 677, 679, 681, 683, 685, 687, 689, 691, 693, 695, 697, 699, 701, 703, 705, 707, 709, 711, 713, 715, 717, 719, 721, 723, 725, 727, 729, 731, 733, 735, 737, 739, 741, 743, 745, 747, 749, 751, 753, 755, 757, 759, 761, 763, 765, 767, 769, 771, 773, 775, 777, 779, 781, 783, 785, 787, 789, 791, 793, 795, 797, 799, 801, 803, 805, 807, 809, 811, 813, 815, 817, 819, 821, 823, 825, 827, 829, 831, 833, 835, 837, 839, 841, 843, 845, 847, 849, 851, 853, 855, 857, 859, 861, 863, 865 and/or 867;
or which comprises a sequence which is complementary thereto; whereby the nucleic acid molecule according to (a) to (g) is at least in one or more nucleotide different from the sequence depicted in SEQ ID NO: 1, 3, 5, 7, 9, 11, 13, 15, 17, 19, 21, 23, 25, 27, 29, 31, 33, 35, 37, 39, 41, 43, 45, 47, 49, 51, 53, 55, 57, 59, 61, 63, 65, 67, 69, 71, 73, 75, 77, 79 and/or 81 and/or 95, 97, 99, 101, 103, 105, 107, 109, 111, 113, 115, 117, 119, 121, 123, 125, 127, 129, 131, 133, 135, 137, 139, 141, 143, 145, 147, 149, 151, 153, 155, 157, 159, 161, 163, 165, 167, 169, 171, 173, 175, 177, 179, 181, 183, 185, 187, 189, 191, 193, 195, 197, 199, 201, 203, 205, 207, 209, 211, 213, 215, 217, 219, 221, 223, 225, 227, 229, 231, 233, 235, 237, 239, 241, 243, 245, 247, 249, 251, 253, 255, 257, 259, 261, 263, 265, 267, 269, 271, 273, 275, 277, 279, 281, 283, 285, 287, 289, 291, 293, 295, 297, 299, 301, 303, 305, 307, 309, 311, 313, 315, 317, 319, 321, 323, 325, 327, 329, 331, 333, 335, 337, 339, 341, 343, 345, 347, 349, 351, 353, 355, 357, 359, 361, 363, 365, 367, 369, 371, 373, 375, 377, 379, 381, 383, 385, 387, 389, 391, 393, 395, 397, 399, 401, 403, 405, 407, 409, 411, 413, 415, 417, 419, 421, 423, 425, 427, 429, 431, 433, 435, 437, 439, 441, 443, 445, 447, 449, 451, 453, 455, 457, 459, 461, 463, 465, 467, 469, 471, 473, 475, 477, 479, 481, 483, 485, 487, 489, 491, 493, 495, 497, 499, 501, 503, 505, 507, 509, 511, 513, 515, 517, 519, 521, 523, 525, 527, 529, 531, 533, 535, 537, 539, 541, 543, 545, 547, 549, 551, 553, 555, 557, 559, 561, 563, 565, 567, 569, 571, 573, 575, 577, 579, 581, 583, 585, 587, 589, 591, 593, 595, 597, 599, 601, 603, 605, 607, 609, 611, 613, 615, 617, 619, 621, 623, 625, 627, 629, 631, 633, 635, 637, 639, 641, 643, 645, 647, 649, 651, 653, 655, 657, 659, 661, 663, 665, 667, 669, 671, 673, 675, 677, 679, 681, 683, 685, 687, 689, 691, 693, 695, 697, 699, 701, 703, 705, 707, 709, 711, 713, 715, 717, 719, 721, 723, 725, 727, 729, 731, 733, 735, 737, 739, 741, 743, 745, 747, 749, 751, 753, 755, 757, 759, 761, 763, 765, 767, 769, 771, 773, 775, 777, 779, 781, 783, 785, 787, 789, 791, 793, 795, 797, 799, 801, 803, 805, 807, 809, 811, 813, 815, 817, 819, 821, 823, 825, 827, 829, 831, 833, 835, 837, 839, 841, 843, 845, 847, 849, 851, 853, 855, 857, 859, 861, 863, 865 and/or 867 and which encodes a protein which differs at least in one or more amino acids from the protein sequences depicted in SEQ ID NO: 2, 4, 6, 8, 10, 12, 14, 16, 18, 20, 22, 24, 26, 28, 30, 32, 34, 36, 38, 40, 42, 44, 46, 48, 50, 52, 54, 56, 58, 60, 62, 64, 66, 68, 70, 72, 74, 76, 78, 80 and/or 82
and/or 96, 98, 100, 102, 104, 106, 108, 110, 112, 114, 116, 118, 120, 122, 124, 126, 128, 130, 132, 134, 136, 138, 140, 142, 144, 146, 148, 150, 152, 154, 156, 158, 160, 162, 164, 166, 168, 170, 172, 174, 176, 178, 180, 182, 184, 186, 188, 190, 192, 194, 196, 198, 200, 202, 204, 206, 208, 210, 212, 214, 216, 218, 220, 222, 224, 226, 228, 230, 232, 234, 236, 238, 240, 242, 244, 246, 248, 250, 252, 254, 256, 258, 260, 262, 264, 266, 268, 270, 272, 274, 276, 278, 280, 282, 284, 286, 288, 290, 292, 294, 296, 298, 300, 302, 304, 306, 308, 310, 312, 314, 316, 318, 320, 322, 324, 326, 328, 330, 332, 334, 336, 338, 340, 342, 344, 346, 348, 350, 352, 354, 356, 358, 360, 362, 364, 366, 368, 370, 372, 374, 376, 378, 380, 382, 384, 386, 388, 390, 392, 394, 396, 398, 400, 402, 404, 406, 408, 410, 412, 414, 416, 418, 420, 422, 424, 426, 428, 430, 432, 434, 436, 438, 440, 442, 444, 446, 448, 450, 452, 454, 456, 458, 460, 462, 464, 466, 468, 470, 472, 474, 476, 478, 480, 482, 484, 486, 488, 490, 492, 494, 496, 498, 500, 502, 504, 506, 508, 510, 512, 514, 516, 518, 520, 522, 524, 526, 528, 530, 532, 534, 536, 538, 540, 542, 544, 546, 548, 550, 552, 554, 556, 558, 560, 562, 564, 566, 568, 570, 572, 574, 576, 578, 580, 582, 584, 586, 588, 590, 592, 594, 596, 598, 600, 602, 604, 606, 608, 610, 612, 614, 616, 618, 620, 622, 624, 626, 628, 630, 632, 634, 636, 638, 640, 642, 644, 646, 648, 650, 652, 654, 656, 658, 660, 662, 664, 666, 668, 670, 672, 674, 676, 678, 680, 682, 684, 686, 688, 690, 692, 694, 696, 698, 700, 702, 704, 706, 708, 710, 712, 714, 716, 718, 720, 722, 724, 726, 728, 730, 732, 734, 736, 738, 740, 742, 744, 746, 748, 750, 752, 754, 756, 758, 760, 762, 764, 766, 768, 770, 772, 774, 776, 778, 780, 782, 784, 786, 788, 790, 792, 794, 796, 798, 800, 802, 804, 806, 808, 810, 812, 814, 816, 818, 820, 822, 824, 826, 828, 830, 832, 834, 836, 838, 840, 842, 844, 846, 848, 850, 852, 854, 856, 858, 860, 862, 864, 866 and/or 868.

24. An isolated polypeptide encoded by a nucleic acid molecule as claimed in claim 23.

25. An antibody, which specifically binds to the polypeptide as claimed in claim 24.

26. A transformed plant cell wherein the increased tolerance and/or resistance to an environmental stress is conferred by one or more inactivated or down-regulated gene encoded by one or more nucleic acid sequence selected from the group consisting of:
a) a nucleic acid molecule encoding the polypeptide shown in SEQ ID NO: 2, 4, 6, 8, 10, 12, 14, 16, 18, 20, 22, 24, 26, 28, 30, 32, 34, 36, 38, 40, 42, 44, 46, 48, 50, 52, 54, 56, 58, 60, 62, 64, 66, 68, 70, 72, 74, 76, 78, 80 and/or 82
and/or 96, 98, 100, 102, 104, 106, 108, 110, 112, 114, 116, 118, 120, 122, 124, 126, 128, 130, 132, 134, 136, 138, 140, 142, 144, 146, 148, 150, 152, 154, 156, 158, 160, 162, 164, 166, 168, 170, 172, 174, 176, 178, 180, 182, 184, 186, 188, 190, 192, 194, 196, 198, 200, 202, 204, 206, 208, 210, 212, 214, 216, 218, 220, 222, 224, 226, 228, 230, 232, 234, 236, 238, 240, 242, 244, 246, 248, 250, 252, 254, 256, 258, 260, 262, 264, 266, 268, 270, 272, 274, 276, 278, 280, 282, 284, 286, 288, 290, 292, 294, 296, 298, 300, 302, 304, 306, 308, 310, 312, 314, 316, 318, 320, 322, 324, 326, 328, 330, 332, 334, 336, 338, 340, 342, 344, 346, 348, 350, 352, 354, 356, 358, 360, 362, 364, 366, 368, 370, 372, 374, 376, 378, 380, 382, 384, 386, 388, 390, 392, 394, 396, 398, 400, 402, 404, 406, 408, 410, 412, 414, 416, 418, 420, 422, 424, 426, 428, 430, 432, 434, 436, 438, 440, 442, 444, 446, 448, 450, 452, 454, 456, 458, 460, 462, 464, 466, 468, 470, 472, 474, 476, 478, 480, 482, 484, 486, 488, 490, 492, 494, 496, 498, 500, 502, 504, 506, 508, 510, 512, 514, 516, 518, 520, 522, 524, 526, 528, 530, 532, 534, 536, 538, 540, 542, 544, 546, 548, 550, 552, 554, 556, 558, 560, 562, 564, 566, 568, 570, 572, 574, 576, 578, 580, 582, 584, 586, 588, 590, 592, 594, 596, 598, 600, 602, 604, 606, 608, 610, 612, 614, 616, 618, 620, 622, 624, 626, 628, 630, 632, 634, 636, 638, 640, 642, 644, 646, 648, 650, 652, 654, 656, 658, 660, 662, 664, 666, 668, 670, 672, 674, 676, 678, 680, 682, 684, 686, 688, 690, 692, 694, 696, 698, 700, 702, 704, 706, 708, 710, 712, 714, 716, 718, 720, 722, 724, 726, 728, 730, 732, 734, 736, 738, 740, 742, 744, 746, 748, 750, 752, 754, 756, 758, 760, 762, 764, 766, 768, 770, 772, 774, 776, 778, 780, 782, 784, 786, 788, 790, 792, 794, 796, 798, 800, 802, 804, 806, 808, 810, 812, 814, 816, 818, 820, 822, 824, 826, 828, 830, 832, 834, 836, 838, 840, 842, 844, 846, 848, 850, 852, 854, 856, 858, 860, 862, 864, 866 and/or 868;
b) a nucleic acid molecule comprising the nucleic acid sequence shown in SEQ ID NO: 1, 3, 5, 7, 9, 11, 13, 15, 17, 19, 21, 23, 25, 27, 29, 31, 33, 35, 37, 39, 41, 43, 45, 47, 49, 51, 53, 55, 57, 59, 61, 63, 65, 67, 69, 71, 73, 75, 77, 79 and/or 81
and/or 95, 97, 99, 101, 103, 105, 107, 109, 111, 113, 115, 117, 119, 121, 123, 125, 127, 129, 131, 133, 135, 137, 139, 141, 143, 145, 147, 149, 151, 153, 155, 157, 159, 161, 163, 165, 167, 169, 171, 173, 175, 177, 179, 181, 183, 185, 187, 189, 191, 193, 195, 197, 199, 201, 203, 205, 207, 209, 211, 213, 215, 217, 219, 221, 223, 225, 227, 229, 231, 233, 235, 237, 239, 241, 243, 245, 247, 249, 251, 253, 255, 257, 259, 261, 263, 265, 267, 269, 271, 273, 275, 277, 279, 281, 283, 285, 287, 289, 291, 293, 295, 297, 299, 301, 303, 305, 307, 309, 311, 313, 315, 317, 319, 321, 323, 325, 327, 329, 331, 333, 335, 337, 339, 341, 343, 345, 347, 349, 351, 353, 355, 357, 359, 361, 363, 365, 367, 369, 371, 373, 375, 377, 379, 381, 383, 385, 387, 389, 391, 393, 395, 397, 399, 401, 403, 405, 407, 409, 411, 413, 415, 417, 419, 421, 423, 425, 427, 429, 431, 433, 435, 437, 439, 441, 443, 445, 447, 449, 451, 453, 455, 457, 459, 461, 463, 465, 467, 469, 471, 473, 475, 477, 479, 481, 483, 485, 487, 489, 491, 493, 495, 497, 499, 501, 503, 505, 507, 509, 511, 513, 515, 517, 519, 521, 523, 525, 527, 529, 531, 533, 535, 537, 539, 541, 543, 545, 547, 549, 551, 553, 555, 557, 559, 561, 563, 565, 567, 569, 571, 573, 575, 577, 579, 581, 583, 585, 587, 589, 591, 593, 595, 597, 599, 601, 603, 605, 607, 609, 611, 613, 615, 617, 619, 621, 623, 625, 627, 629, 631, 633, 635, 637, 639, 641, 643, 645, 647, 649, 651, 653, 655, 657, 659, 661, 663, 665, 667, 669, 671, 673, 675, 677, 679, 681, 683, 685, 687, 689, 691, 693, 695, 697, 699, 701, 703, 705, 707, 709, 711, 713, 715, 717, 719, 721, 723, 725, 727, 729, 731, 733, 735, 737, 739, 741, 743, 745, 747, 749, 751, 753, 755, 757, 759, 761, 763, 765, 767, 769, 771, 773, 775, 777, 779, 781, 783, 785, 787, 789, 791, 793, 795, 797, 799, 801, 803, 805, 807, 809, 811, 813, 815, 817, 819, 821, 823, 825, 827, 829, 831, 833, 835, 837, 839, 841, 843, 845, 847, 849, 851, 853, 855, 857, 859, 861, 863, 865 and/or 867;
c) a nucleic acid molecule comprising a nucleic acid sequence, which, as a result of the degeneracy of the genetic code, can be derived from a polypeptide sequence depicted in SEQ ID NO: 2, 4, 6, 8, 10, 12, 14, 16, 18, 20, 22, 24, 26, 28, 30, 32, 34, 36, 38, 40, 42, 44, 46, 48, 50, 52, 54, 56, 58, 60, 62, 64, 66, 68, 70, 72, 74, 76, 78, 80 and/or 82;
d) a nucleic acid molecule encoding a polypeptide having at least 50% identity with the amino acid sequence of the polypeptide encoded by the nucleic acid molecule of (a) to (c) and having the biological activity represented by a protein of SEQ ID NO: 2, 4, 6, 8, 10, 12, 14, 16, 18, 20, 22, 24, 26, 28, 30, 32, 34, 36, 38, 40, 42, 44, 46, 48, 50, 52, 54, 56, 58, 60, 62, 64, 66, 68, 70, 72, 74, 76, 78, 80 and/or 82
and/or 96, 98, 100, 102, 104, 106, 108, 110, 112, 114, 116, 118, 120, 122, 124, 126, 128, 130, 132, 134, 136, 138, 140, 142, 144, 146, 148, 150, 152, 154, 156, 158, 160, 162, 164, 166, 168, 170, 172, 174, 176, 178, 180, 182, 184, 186, 188, 190, 192, 194, 196, 198, 200, 202, 204, 206, 208, 210, 212, 214, 216, 218, 220, 222, 224, 226, 228, 230, 232, 234, 236, 238, 240, 242, 244, 246, 248, 250, 252, 254, 256, 258, 260, 262, 264, 266, 268, 270, 272, 274, 276, 278, 280, 282, 284, 286, 288, 290, 292, 294, 296, 298, 300, 302, 304, 306, 308, 310, 312, 314, 316, 318, 320, 322, 324, 326, 328, 330, 332, 334, 336, 338, 340, 342, 344, 346, 348, 350, 352, 354, 356, 358, 360, 362, 364, 366, 368, 370, 372, 374, 376, 378, 380, 382, 384, 386, 388, 390, 392, 394, 396, 398, 400, 402, 404, 406, 408, 410, 412, 414, 416, 418, 420, 422, 424, 426, 428, 430, 432, 434, 436, 438, 440, 442, 444, 446, 448, 450, 452, 454, 456, 458, 460, 462, 464, 466, 468, 470, 472, 474, 476, 478, 480, 482, 484, 486, 488, 490, 492, 494, 496, 498, 500, 502, 504, 506, 508, 510, 512, 514, 516, 518, 520, 522, 524, 526, 528, 530, 532, 534, 536, 538, 540, 542, 544, 546, 548, 550, 552, 554, 556, 558, 560, 562, 564, 566, 568, 570, 572, 574, 576, 578, 580, 582, 584, 586, 588, 590, 592, 594, 596, 598, 600, 602, 604, 606, 608, 610, 612, 614, 616, 618, 620, 622, 624, 626, 628, 630, 632, 634, 636, 638, 640, 642, 644, 646, 648, 650, 652, 654, 656, 658, 660, 662, 664, 666, 668, 670, 672, 674, 676, 678, 680, 682, 684, 686, 688, 690, 692, 694, 696, 698, 700, 702, 704, 706, 708, 710, 712, 714, 716, 718, 720, 722, 724, 726, 728, 730, 732, 734, 736, 738, 740, 742, 744, 746, 748, 750, 752, 754, 756, 758, 760, 762, 764, 766, 768, 770, 772, 774, 776, 778, 780, 782, 784, 786, 788, 790, 792, 794, 796, 798, 800, 802, 804, 806, 808, 810, 812, 814, 816, 818, 820, 822, 824, 826, 828, 830, 832, 834, 836, 838, 840, 842, 844, 846, 848, 850, 852, 854, 856, 858, 860, 862, 864, 866 and/or 868;
e) a nucleic acid molecule encoding a polypeptide which is isolated with the aid of monoclonal antibodies against a polypeptide encoded by one of the nucleic acid molecules of (a) to (d) and having the biological activity represented by the protein of SEQ ID NO: 2, 4, 6, 8, 10, 12, 14, 16, 18, 20, 22, 24, 26, 28, 30, 32, 34, 36, 38, 40, 42, 44, 46, 48, 50, 52, 54, 56, 58, 60, 62, 64, 66, 68, 70, 72, 74, 76, 78, 80 and/or 82
and/or 96, 98, 100, 102, 104, 106, 108, 110, 112, 114, 116, 118, 120, 122, 124, 126, 128, 130, 132, 134, 136, 138, 140, 142, 144, 146, 148, 150, 152, 154, 156, 158, 160, 162, 164, 166, 168, 170, 172, 174, 176, 178, 180, 182, 184, 186, 188, 190, 192, 194, 196, 198, 200, 202, 204, 206, 208, 210, 212, 214, 216, 218, 220, 222, 224, 226, 228, 230, 232, 234, 236, 238, 240, 242, 244, 246, 248, 250, 252, 254, 256, 258, 260, 262, 264, 266, 268, 270, 272, 274, 276, 278, 280, 282, 284, 286, 288, 290, 292, 294, 296, 298, 300, 302, 304, 306, 308, 310, 312, 314, 316, 318, 320, 322, 324, 326, 328, 330, 332, 334, 336, 338, 340, 342, 344, 346, 348, 350, 352, 354, 356, 358, 360, 362, 364, 366, 368, 370, 372, 374, 376, 378, 380, 382, 384, 386, 388, 390, 392, 394, 396, 398, 400, 402, 404, 406, 408, 410, 412, 414, 416, 418, 420, 422, 424, 426, 428, 430, 432, 434, 436, 438, 440, 442, 444, 446, 448, 450, 452, 454, 456, 458, 460, 462, 464, 466, 468, 470, 472, 474, 476, 478, 480, 482, 484, 486, 488, 490, 492, 494, 496, 498, 500, 502, 504, 506, 508, 510, 512, 514, 516, 518, 520, 522, 524, 526, 528, 530, 532, 534, 536, 538, 540, 542, 544, 546, 548, 550, 552, 554, 556, 558, 560, 562, 564, 566, 568, 570, 572, 574, 576, 578, 580, 582, 584, 586, 588, 590, 592, 594, 596, 598, 600, 602, 604, 606, 608, 610, 612, 614, 616, 618, 620, 622, 624, 626, 628, 630, 632, 634, 636, 638, 640, 642, 644, 646, 648, 650, 652, 654, 656, 658, 660, 662, 664, 666, 668, 670, 672, 674, 676, 678, 680, 682, 684, 686, 688, 690, 692, 694, 696, 698, 700, 702, 704, 706, 708, 710, 712, 714, 716, 718, 720, 722, 724, 726, 728, 730, 732, 734, 736, 738, 740, 742, 744, 746, 748, 750, 752, 754, 756, 758, 760, 762, 764, 766, 768, 770, 772, 774, 776, 778, 780, 782, 784, 786, 788, 790, 792, 794, 796, 798, 800, 802, 804, 806, 808, 810, 812, 814, 816, 818, 820, 822, 824, 826, 828, 830, 832, 834, 836, 838, 840, 842, 844, 846, 848, 850, 852, 854, 856, 858, 860, 862, 864, 866 and/or 868;
f) a nucleic acid molecule which is obtainable by screening a suitable nucleic acid library under stringent hybridisation conditions with a probe comprising one of the sequences of the nucleic acid molecule of (a) or (b) or with a fragment thereof having at least 15 nt, of the nucleic acid molecule characterized in (a) to (c) and encoding a polypeptide having the biological activity represented by a protein whose reduction or deletion results in increased tolerance and/or resistance to an environmental stress; and
g) a nucleic acid molecule having at least 70% sequence identity to a polynucleotide selected from the group consisting of the polynucleotide shown in SEQ ID NO: 1, 3, 5, 7, 9, 11, 13, 15, 17, 19, 21, 23, 25, 27, 29, 31, 33, 35, 37, 39, 41, 43, 45, 47, 49, 51, 53, 55, 57, 59, 61, 63, 65, 67, 69, 71, 73, 75, 77, 79 and/or 81
and/or 95, 97, 99, 101, 103, 105, 107, 109, 111, 113, 115, 117, 119, 121, 123, 125, 127, 129, 131, 133, 135, 137, 139, 141, 143, 145, 147, 149, 151, 153, 155, 157, 159, 161, 163, 165, 167, 169, 171, 173, 175, 177, 179, 181, 183, 185, 187, 189, 191, 193, 195, 197, 199, 201, 203, 205, 207, 209, 211, 213, 215, 217, 219, 221, 223, 225, 227, 229, 231, 233, 235, 237, 239, 241, 243, 245, 247, 249, 251, 253, 255, 257, 259, 261, 263, 265, 267, 269, 271, 273, 275, 277, 279, 281, 283, 285, 287, 289, 291, 293, 295, 297, 299, 301, 303, 305, 307, 309, 311, 313, 315, 317, 319, 321, 323, 325, 327, 329, 331, 333, 335, 337, 339, 341, 343, 345, 347, 349, 351, 353, 355, 357, 359, 361, 363, 365, 367, 369, 371, 373, 375, 377, 379, 381, 383, 385, 387, 389, 391, 393, 395, 397, 399, 401, 403, 405, 407, 409, 411, 413, 415, 417, 419, 421, 423, 425, 427, 429, 431, 433, 435, 437, 439, 441, 443, 445, 447, 449, 451, 453, 455, 457, 459, 461, 463, 465, 467, 469, 471, 473, 475, 477, 479, 481, 483, 485, 487, 489, 491, 493, 495, 497, 499, 501, 503, 505, 507, 509, 511, 513, 515, 517, 519, 521, 523, 525, 527, 529, 531, 533, 535, 537, 539, 541, 543, 545, 547, 549, 551, 553, 555, 557, 559, 561, 563, 565, 567, 569, 571, 573, 575, 577, 579, 581, 583, 585, 587, 589, 591, 593, 595, 597, 599, 601, 603, 605, 607, 609, 611, 613, 615, 617, 619, 621, 623, 625, 627, 629, 631, 633, 635, 637, 639, 641, 643, 645, 647, 649, 651, 653, 655, 657, 659, 661, 663, 665, 667, 669, 671, 673, 675, 677, 679, 681, 683, 685, 687, 689, 691, 693, 695, 697, 699, 701, 703, 705, 707, 709, 711, 713, 715, 717, 719, 721, 723, 725, 727, 729, 731, 733, 735, 737, 739, 741, 743, 745, 747, 749, 751, 753, 755, 757, 759, 761, 763, 765, 767, 769, 771, 773, 775, 777, 779, 781, 783, 785, 787, 789, 791, 793, 795, 797, 799, 801, 803, 805, 807, 809, 811, 813, 815, 817, 819, 821, 823, 825, 827, 829, 831, 833, 835, 837, 839, 841, 843, 845, 847, 849, 851, 853, 855, 857, 859, 861, 863, 865 and/or 867;
or which comprises a sequence which is complementary thereto.

27. A plant comprising the cell of claim 26.
